(19) United States
(12) Patent Application Publication
(10) Pub. No.: US 2023/0416742 A1
(43) Pub. Date: Dec. 28, 2023

(54) COMPOSITIONS AND METHODS FOR INHIBITING MAPT EXPRESSION

(71) Applicant: Dicerna Phrmaceuticals, Inc., Lexington, MA (US)

(72) Inventors: Bob Dale BROWN, Littleton, MA (US); Henryk T. DUDEK, Belmont, MA (US); Seongmoon CHEONG, Harvard, MA (US); Shiyu WANG, Belmont, MA (US); Travis GRIM, Maynard, MA (US); Matthew Guese COSTALES, Lexington, MA (US); Maire JUNG, Lincoln, MA (US)

(21) Appl. No.: 18/316,529

(22) Filed: May 12, 2023

Related U.S. Application Data
(60) Provisional application No. 63/364,609, filed on May 12, 2022.

(51) Int. Cl. C12N 15/113

(52) U.S. Cl. CPC C12N 15/113; C12N 2310/321; C12N 2310/322; C12N 2310/315; C12N 2310/351; C12N 2310/14; C12N 2310/3515

(57) ABSTRACT

Oligonucleotides are provided herein that inhibit MAPT gene expression, including oligonucleotides conjugated to a targeting ligand (e.g., lipid moiety). Also provided are compositions including the same and uses thereof, particularly uses relating to treating diseases, disorders, and/or conditions associated with MAPT gene expression.

### CROSS-REFERENCE TO RELATED APPLICATIONS

[0001] The present application claims priority under 35 U.S.C. § 119(e) from U.S. Provisional Application No. 63/364,609, filed May 12, 2022, which is incorporated herein by reference in its entirety.

### TECHNICAL FIELD

[0002] The disclosure relates generally to biology and medicine, and more particularly it relates to oligonucleotides and compositions including the same for inhibiting or reducing (i.e., modulating) microtubule-associated protein tau (MAPT) gene expression, as well as their use for treating diseases and disorders associated with MAPT gene expression.

### BACKGROUND

[0003] Microtubules perform several essential roles within cells throughout the body. Within the central nervous system (CNS), microtubules provide structural support and assist in transporting substances throughout cells. Changes in microtubule mass, structure, and pattern are known factors leading to the development of many neurodegenerative diseases. Tau is an essential protein for forming microtubules, whose abnormal expression leads to neurodegenerative diseases. Tau proteins combine with tubulin to form microtubules. Alternative splicing of MAPT generates different Tau proteins used in microtubule assembly. Mutations (e.g., insertions and mismatches) in MAPT that alter Tau function and expression are known causes of several diseases and disorders impacting the CNS (e.g., Alzheimer's disease (AD), Parkinson's disease (PD), and tauopathies). Strategies for targeting MAPT gene expression to prevent such diseases and disorders are needed.

[0004] The mammalian CNS is a complex system of tissues, including cells, fluids, and chemicals that interact in concert to enable a wide variety of functions, including movement, navigation, cognition, speech, vision, and emotion. Unfortunately, a variety of diseases and disorders of the CNS are known (e.g., neurological disorders) and affect or disrupt some or all of these functions. Typically, treatments for diseases and disorders of the CNS have been limited to small molecule drugs, antibodies, and/or to adaptive or behavioral therapies. There exists an ongoing need to develop treatments for diseases and disorders of the CNS associated with inappropriate MAPT gene expression.

### BRIEF SUMMARY

[0005] To address this need, the disclosure describes compositions for and methods of treating a disease, disorder, or condition associated with MAPT gene expression. The disclosure is based, at least in part, on discovering and developing double-stranded (ds) oligonucleotides such as RNAi oligonucleotides that effectively target and reduce MAPT gene expression in tissues of the CNS. Specifically, target sequences within MAPT mRNA were identified, and oligonucleotides that bind to these target sequences and inhibit MAPT mRNA expression were generated. As demonstrated herein, the oligonucleotides inhibit human and non-human primate (NIP) MAPT gene expression in CNS tissue. Further, MAPT mRNA expression was reduced in CNS tissue associated with AD or progressive supranuclear palsy (PSP) with both N-acetylgalactosamine (GalNAc)-conjugated and lipid-conjugated MAPT mRNA-targeting oligonucleotides. Without being bound by theory, the oligonucleotides described herein are useful for treating a disease, disorder, or condition associated with MAPT gene expression.

[0006] Accordingly, and in some aspects, the disclosure provides a RNAi oligonucleotide for reducing MAPT gene expression, the oligonucleotide comprising a sense strand and an antisense strand, wherein the sense strand and the antisense strand form a duplex region, wherein the antisense strand comprises a region of complementarity to a MAPT mRNA target sequence of any one of SEQ ID NOs: 912-1295, and wherein the region of complementarity is at least about 15 contiguous nucleotides in length.

[0007] In any of the foregoing or related aspects, the sense strand is about 15 to about 50 nucleotides in length. In some aspects, the sense strand is 18 to 36 nucleotides in length. In some aspects, the antisense strand is about 15 to about 30 nucleotides in length. In some aspects, the antisense strand is 22 nucleotides in length, wherein the antisense strand and the sense strand form a duplex region of at least about 19 nucleotides in length, optionally at least 20 nucleotides in length. In some aspects, the region of complementarity is at least about 19 contiguous nucleotides in length. In some aspects, the region of complementarity is at least about 20 contiguous nucleotides in length.

[0008] In other aspects, the disclosure provides a ds RNAi oligonucleotide for reducing MAPT gene expression, the oligonucleotide comprising:
[0009] (i) an antisense strand of about 19-30 nucleotides in length, wherein the antisense strand comprises a nucleotide sequence comprising a region of complementarity to a MAPT mRNA target sequence, wherein the region of complementarity is selected from SEQ ID NOs: 1296-1679, and
[0010] (ii) a sense strand of about 19-50 nucleotides in length comprising a region of complementarity to the antisense strand, wherein the antisense and sense strands are separate strands that form an asymmetric duplex region having an overhang of 1-4 nucleotides at the 3′ terminus of the antisense strand.

[0011] In some aspects, the 3′ end of the sense strand comprises a stem-loop set forth as S1-L-S2, wherein S1 is complementary to S2, and wherein L forms a loop between S1 and S2 of 3-5 nucleotides in length. In some aspects, L is a triloop (triL) or a tetraloop (tetraL). In some aspects, L is a tetraL. In some aspects, the tetraL comprises the sequence 5′-GAAA-3′. In some aspects, S1 and S2 are about 1 to about 10 nucleotides in length and have the same length. In some aspects, S1 and S2 are 1 nucleotide, 2 nucleotides, 3 nucleotides, 4 nucleotides, 5 nucleotides, 6 nucleotides, 7 nucleotides, 8 nucleotides, 9 nucleotides, or 10 nucleotides in length. In some aspects, S1 and S2 are 6 nucleotides in length. In some aspects, the stem-loop comprises the sequence 5′-GCAGCCGAAAGGCUGC-3′ (SEQ ID NO: 1680).

[0012] In other aspects, the oligonucleotide comprises a blunt end. In some aspects, the blunt end comprises the 3′ end of the sense strand. In some aspects, the sense strand is about 20-22 nucleotides. In some aspects, the sense strand is 20 nucleotides.

[0013] In any of the foregoing or related aspects, the antisense strand comprises a 3′ overhang sequence of one or more nucleotides in length. In some aspects, the overhang comprises purine nucleotides. In some aspects, the 3′ overhang sequence is 2 nucleotides in length. In some aspects, the 3′ overhang is selected from AA, GG, AG, and GA. In some aspects, the overhang is GG or AA. In some aspects, the overhang is GG.

[0014] In any of the foregoing or related aspects, the oligonucleotide comprises at least one modified nucleotide. In some aspects, the modified nucleotide comprises a 2-modification. In some aspects, the 2-modification is a modification selected from 2′-aminoethyl (EA), 2′-fluoro (2′-F), 2′-O-methyl (2′-OMe), 2′-O-methoxyethyl (2′-OME), and 2′-deoxy-2′-fluoro-β-d-arabinonucleic acid (2′-FANA). In some aspects, the modification is a 2′-modification selected from 2′-F and 2′-OMe. In some aspects, about 18% to about 23%, or 18%, 19%, 20%, 21%, 22%, or 23% of the nucleotides of the sense strand comprise a 2′-F modification. In other aspects, about 38% to about 43%, or 38%, 39%, 40%, 41%, 42%, or 43% of the nucleotides of the sense strand comprise a 2′-F modification. In some aspects, about 25% to about 35%, or 25%, 26%, 27%, 28%, 29%, 30%, 31%, 32%, 33%, 34%, or 35% of the nucleotides of the antisense strand comprise a 2′-F modification. In some aspects, about 25% to about 35%, or 25%, 26%, 27%, 28%, 29%, 30%, 31%, 32%, 33%, 34%, or 35% of the nucleotides of the oligonucleotide comprise a 2′-F modification. In some aspects, about 35-45%, 35%, 36%, 37%, 38%, 39% 40%, 41%, 42%, 43%, 44% or 45% of the nucleotides of the oligonucleotide comprise a 2′-F modification. In some aspects, the sense strand comprises 20 nucleotides with positions 1-20 from 5′ to 3′, wherein each of positions 3, 5, 8, 10, 12, 13, 15, and 17 comprise a 2′-F modification. In other aspects, the sense strand comprises 36 nucleotides with positions 1-36 from 5′ to 3′, wherein each of positions 3, 5, 8, 10, 12, 13, 15, and 17 comprise a 2′-F modification. In some aspects, the antisense strand comprises 22 nucleotides with positions 1-22 from 5′ to 3′, and wherein each of positions 2, 3, 4, 5, 7, 10 14, 16, and 19 comprise a 2′-F modification. In some aspects, the remaining nucleotides comprise a 2′-OMe modification.

[0015] In any of the foregoing or related aspects, the oligonucleotide comprises at least one modified internucleotide linkage. In some aspects, the at least one modified internucleotide linkage is a phosphorothioate linkage. In some aspects, the antisense strand comprises a phosphorothioate linkage (i) between positions 1 and 2, and between positions 2 and 3; or (ii) between positions 1 and 2, between positions 2 and 3, and between positions 3 and 4, wherein positions are numbered 1-4 from 5′ to 3′. In some aspects, the antisense strand is 22 nucleotides in length, and wherein the antisense strand comprises a phosphorothioate linkage between positions 20 and 21 and between positions 21 and 22, wherein positions are numbered 1-22 from 5′ to 3′. In some aspects, the sense strand comprises a phosphorothioate linkage between positions 1 and 2, wherein positions are numbered 1-2 from 5′ to 3′. In some aspects, the sense strand is 20 nucleotides in length, and wherein the sense strand comprises a phosphorothioate linkage between positions between positions 1 and 2, between positions 18 and 19 and between positions 19 and 20, wherein positions are numbered 1-20 from 5′ to 3′.

[0016] In any of the foregoing or related aspects, the 4′-carbon of the sugar of the 5′-nucleotide of the antisense strand comprises a phosphate analog. In some aspects, the phosphate analog is oxymethyl phosphonate, vinyl phosphonate or malonyl phosphonate, optionally wherein the phosphate analog is a 4′-phosphate analog comprising 4′-oxymethylphosphonate.

[0017] In any of the foregoing or related aspects, at least one nucleotide of the oligonucleotide is conjugated to one or more targeting ligands. In some aspects, each targeting ligand comprises a carbohydrate, amino sugar, lipid, cholesterol, or polypeptide. In some aspects, the stem-loop comprises one or more targeting ligands conjugated to one or more nucleotides of the stem-loop. In some aspects, the one or more targeting ligands is conjugated to one or more nucleotides of the loop. In some aspects, the loop comprises 4 nucleotides numbered 1-4 from 5′ to 3′, wherein nucleotides at positions 2, 3, and 4 each comprise one or more targeting ligands, wherein the targeting ligands are the same or different. In some aspects, each targeting ligand comprises a GalNAc moiety. In some aspects, the GalNac moiety is a monovalent GalNAc moiety, a bivalent GalNAc moiety, a trivalent GalNAc moiety, or a tetravalent GalNAc moiety. In some aspects, up to 4 nucleotides of L of the stem-loop are each conjugated to a monovalent GalNAc moiety.

[0018] In other aspects, the one or more targeting ligands is a lipid moiety. In some aspects, the lipid moiety is conjugated to the 5′ terminal nucleotide of the sense strand. In some aspects, the lipid moiety is a hydrocarbon chain. In some aspects, the hydrocarbon chain is a C₈-C₃₀ hydrocarbon chain. In some aspects, the hydrocarbon chain is a C₁₆ hydrocarbon chain. In some aspects, the C₁₆ hydrocarbon chain is represented by:

[chemical structure]

In some aspects, the lipid moiety is conjugated to the 2′ carbon of the ribose ring of the 5′ terminal nucleotide.

[0019] In any of the foregoing or related aspects, the region of complementarity is fully complementary to the MAPT mRNA target sequence at nucleotide positions 2-8 of the antisense strand, wherein nucleotide positions are numbered 5′ to 3′. In some aspects, the region of complementarity is fully complementary to the MAPT mRNA target sequence at nucleotide positions 2-11 of the antisense strand, wherein nucleotide positions are numbered 5′ to 3′.

[0020] In any of the foregoing or related aspects, the sense strand comprises a nucleotide sequence of any one of SEQ ID NOs: 769-803 and 1681. In some aspects, the antisense strand comprises a nucleotide sequence of any one of SEQ ID NOs: 804-838.

[0021] In some aspects, the sense strand and antisense strands comprise nucleotide sequences selected from the group consisting of:
[0022] a) SEQ ID NOs: 769 and 804, respectively;
[0023] b) SEQ ID NOs: 770 and 805, respectively;
[0024] c) SEQ ID NOs: 771 and 806, respectively;
[0025] d) SEQ ID NOs: 772 and 807, respectively;
[0026] e) SEQ ID NOs: 773 and 808, respectively;
[0027] f) SEQ ID NOs: 774 and 809, respectively;
[0028] g) SEQ ID NOs: 775 and 810, respectively;
[0029] h) SEQ ID NOs: 776 and 811, respectively;
[0030] i) SEQ ID NOs: 777 and 812, respectively;
[0031] j) SEQ ID NOs: 778 and 813, respectively;
[0032] k) SEQ ID NOs: 779 and 814, respectively;
[0033] l) SEQ ID NOs: 780 and 815, respectively;
[0034] m) SEQ ID NOs: 781 and 816, respectively;
[0035] n) SEQ ID NOs: 782 and 817, respectively;
[0036] o) SEQ ID NOs: 783 and 818, respectively;
[0037] p) SEQ ID NOs: 784 and 819, respectively;
[0038] q) SEQ ID NOs: 785 and 820, respectively;
[0039] r) SEQ ID NOs: 786 and 821, respectively;
[0040] s) SEQ ID NOs: 787 and 822, respectively;
[0041] t) SEQ ID NOs: 788 and 823, respectively;
[0042] u) SEQ ID NOs: 789 and 824, respectively;
[0043] v) SEQ ID NOs: 790 and 825, respectively;
[0044] w) SEQ ID NOs: 791 and 826, respectively;
[0045] x) SEQ ID NOs: 792 and 827, respectively;
[0046] y) SEQ ID NOs: 793 and 828, respectively;
[0047] z) SEQ ID NOs: 794 and 829, respectively;
[0048] aa) SEQ ID NOs: 795 and 830, respectively;
[0049] bb) SEQ ID NOs: 796 and 831, respectively;
[0050] cc) SEQ ID NOs: 797 and 832, respectively;
[0051] dd) SEQ ID NOs: 798 and 833, respectively;
[0052] ee) SEQ ID NOs: 799 and 834, respectively;
[0053] ff) SEQ ID NOs: 800 and 835, respectively;
[0054] gg) SEQ ID NOs: 801 and 836, respectively;
[0055] hh) SEQ ID NOs: 802 and 837, respectively;
[0056] ii) SEQ ID NOs: 803 and 838, respectively; and
[0057] jj) SEQ ID NOs: 1681 and 815, respectively.

[0058] In some aspects, the sense strand and antisense strands comprise nucleotide sequences selected from the group consisting of:
[0059] a) SEQ ID NOs: 771 and 806, respectively;
[0060] b) SEQ ID NOs: 776 and 811, respectively;
[0061] c) SEQ ID NOs: 780 and 815, respectively;
[0062] d) SEQ ID NOs: 781 and 816, respectively;
[0063] e) SEQ ID NOs: 782 and 817, respectively;
[0064] f) SEQ ID NOs: 790 and 825, respectively;
[0065] g) SEQ ID NOs: 795 and 830, respectively;
[0066] h) SEQ ID NOs: 798 and 833, respectively;
[0067] i) SEQ ID NOs: 799 and 834, respectively;
[0068] j) SEQ ID NOs: 803 and 838, respectively;
[0069] k) SEQ ID NOs: 1681 and 815, respectively.

[0070] In some aspects, the sense strand and antisense strands comprise nucleotide sequences selected from the group consisting of:
[0071] a) SEQ ID NOs: 771 and 806, respectively;
[0072] b) SEQ ID NOs: 780 and 815, respectively;
[0073] c) SEQ ID NOs: 781 and 816, respectively;
[0074] d) SEQ ID NOs: 798 and 833, respectively;
[0075] e) SEQ ID NOs: 799 and 834, respectively;
[0076] f) SEQ ID NOs: 803 and 838, respectively; and
[0077] g) SEQ ID NOs: 1681 and 815, respectively.

[0078] In some aspects, the sense strand comprises the nucleotide sequence as set forth in SEQ ID NO: 771, and the antisense strand comprises the nucleotide sequence as set forth in SEQ ID NO: 806. In some aspects, the sense strand comprises the nucleotide sequence as set forth in SEQ ID NO: 780, and the antisense strand comprises the nucleotide sequence as set forth in SEQ ID NO: 815. In some aspects, the sense strand comprises the nucleotide sequence as set forth in SEQ ID NO: 781, and the antisense strand comprises the nucleotide sequence as set forth in SEQ ID NO: 816. In some aspects, the sense strand comprises the nucleotide sequence as set forth in SEQ ID NO: 798, and the antisense strand comprises the nucleotide sequence as set forth in SEQ ID NO: 833. In some aspects, the sense strand comprises the nucleotide sequence as set forth in SEQ ID NO: 799, and the antisense strand comprises the nucleotide sequence as set forth in SEQ ID NO: 834. In some aspects, the sense strand comprises the nucleotide sequence as set forth in SEQ ID NO: 803, and the antisense strand comprises the nucleotide sequence as set forth in SEQ ID NO: 838. In some aspects, the sense strand comprises the nucleotide sequence as set forth in SEQ ID NO: 1681, and the antisense strand comprises a nucleotide sequence as set forth in SEQ ID NO: 815.

[0079] In any of the foregoing or related aspects, the antisense strand is 22 nucleotides in length. In some aspects, the antisense strand comprises a nucleotide sequence selected from SEQ ID NOs: 806, 815, 816, 833, 834, and 838. In some aspects, the sense strand is 36 nucleotides in length. In some aspects, the sense strand comprises a nucleotide sequence selected from SEQ ID NOs: 1130, 1095, 1096, 1119, 1120, and 1124. In some aspects, the sense strand comprises a nucleotide sequence selected from SEQ ID NOs: 771, 780, 781, 798, 799, and 803.

[0080] In any of the foregoing or related aspects, the sense strand comprises a nucleotide sequence of any one of SEQ ID NOs: 839-873 and 1682. In some aspects, the antisense strand comprises a nucleotide sequence of any one of SEQ ID NOs: 874-908.

[0081] In some aspects, the sense strand and antisense strands comprise nucleotide sequences selected from:
[0082] a) SEQ ID NOs: 839 and 874, respectively;
[0083] b) SEQ ID NOs: 840 and 875, respectively;
[0084] c) SEQ ID NOs: 841 and 876, respectively;
[0085] d) SEQ ID NOs: 842 and 877, respectively;
[0086] e) SEQ ID NOs: 843 and 878, respectively;
[0087] f) SEQ ID NOs: 844 and 879, respectively;
[0088] g) SEQ ID NOs: 845 and 880, respectively;
[0089] h) SEQ ID NOs: 846 and 881, respectively;
[0090] i) SEQ ID NOs: 847 and 882, respectively;
[0091] j) SEQ ID NOs: 848 and 883, respectively;
[0092] k) SEQ ID NOs: 849 and 884, respectively;
[0093] l) SEQ ID NOs: 850 and 885, respectively;
[0094] m) SEQ ID NOs: 851 and 886, respectively;
[0095] n) SEQ ID NOs: 852 and 887, respectively;
[0096] o) SEQ ID NOs: 853 and 888, respectively;
[0097] p) SEQ ID NOs: 854 and 889, respectively;
[0098] q) SEQ ID NOs: 855 and 890, respectively;
[0099] r) SEQ ID NOs: 856 and 891, respectively;
[0100] s) SEQ ID NOs: 857 and 892, respectively;
[0101] t) SEQ ID NOs: 858 and 893, respectively;
[0102] u) SEQ ID NOs: 859 and 894, respectively;
[0103] v) SEQ ID NOs: 860 and 895, respectively;
[0104] w) SEQ ID NOs: 861 and 896, respectively;
[0105] x) SEQ ID NOs: 862 and 897, respectively;
[0106] y) SEQ ID NOs: 863 and 898, respectively;
[0107] z) SEQ ID NOs: 864 and 899, respectively;
[0108] aa) SEQ ID NOs: 865 and 900, respectively;
[0109] bb) SEQ ID NOs: 866 and 901, respectively;
[0110] cc) SEQ ID NOs: 867 and 902, respectively;
[0111] dd) SEQ ID NOs: 868 and 903, respectively;
[0112] ee) SEQ ID NOs: 869 and 904, respectively;
[0113] ff) SEQ ID NOs: 870 and 905, respectively;
[0114] gg) SEQ ID NOs: 871 and 906, respectively;
[0115] hh) SEQ ID NOs: 872 and 907, respectively;
[0116] ii) SEQ ID NOs: 873 and 908, respectively; and
[0117] jj) SEQ ID NOs: 1682 and 885, respectively.

[0118] In other aspects, the sense strand and antisense strands comprise nucleotide sequences selected from the group consisting of:
[0119] a) SEQ ID NOs: 860 and 895, respectively;
[0120] b) SEQ ID NOs: 865 and 900, respectively;
[0121] c) SEQ ID NOs: 868 and 903, respectively;
[0122] d) SEQ ID NOs: 869 and 904, respectively;
[0123] e) SEQ ID NOs: 873 and 908, respectively;
[0124] f) SEQ ID NOs: 841 and 876, respectively;
[0125] g) SEQ ID NOs: 846 and 881, respectively;
[0126] h) SEQ ID NOs: 850 and 885, respectively;
[0127] i) SEQ ID NOs: 851 and 886, respectively;
[0128] j) SEQ ID NOs: 852 and 887, respectively; and
[0129] k) SEQ ID NOs: 1682 and 885, respectively.

[0130] In certain aspects, the sense strand and antisense strands comprise nucleotide sequences selected from the group consisting of:
[0131] a) SEQ ID NOs: 841 and 876, respectively;
[0132] b) SEQ ID NOs: 850 and 885, respectively;
[0133] c) SEQ ID NOs: 851 and 886, respectively;
[0134] d) SEQ ID NOs: 868 and 903, respectively;
[0135] e) SEQ ID NOs: 869 and 904, respectively;
[0136] f) SEQ ID NOs: 873 and 908, respectively; and
[0137] g) SEQ ID NOs: 1682 and 885, respectively.

[0138] In some aspects, the sense strand comprises the nucleotide sequence as set forth in SEQ ID NO: 841, and the antisense strand comprises the nucleotide sequence as set forth in SEQ ID NO: 876. In some aspects, the sense strand comprises the nucleotide sequence as set forth in SEQ ID NO: 850, and the antisense strand comprises the nucleotide sequence as set forth in SEQ ID NO: 885. In some aspects, the sense strand comprises the nucleotide sequence as set forth in SEQ ID NO: 851, and the antisense strand comprises the nucleotide sequence as set forth in SEQ ID NO: 886. In some aspects, the sense strand comprises the nucleotide sequence as set forth in SEQ ID NO: 868, and the antisense strand comprises the nucleotide sequence as set forth in SEQ ID NO: 903. In some aspects, the sense strand comprises the nucleotide sequence as set forth in SEQ ID NO: 869, and the antisense strand comprises the nucleotide sequence as set forth in SEQ ID NO: 904. In some aspects, the sense strand comprises the nucleotide sequence as set forth in SEQ ID NO: 873, and the antisense strand comprises the nucleotide sequence as set forth in SEQ ID NO: 908. In some aspects, the sense strand comprises the nucleotide sequence as set forth in SEQ ID NO: 1682, and the antisense strand comprises the nucleotide sequence as set forth in SEQ ID NO: 885.

[0139] In some aspects, the sense strand comprises the sequence and all of the modifications of 5′-[mAs][mG][fA][mG][fJ][mG][mU][fG][mG][fA][mA][fA][fA][mA][fA][mA][fA][mA][mG][mA][mG][mC][mA][mG][mC][mC][mG][ademA-GalNAc][ademA-GalNAc][ademAGalNAc][mG][mG][mC][mU][mG][mC]-3′ (SEQ ID NO: 841), and wherein the antisense strand comprises the sequence and all of the modifications of 5′-[MePhosphonate-4O-mUs][fCs][fU][fU][fU][mU][fU][mU][mU][fU][mU][mC][mC][fA][mC][fA][mC][mU][fC][mUs][mGs][mG]-3′ (SEQ ID NO: 876), wherein mC, mA, mG, mU=2′-OMe ribonucleosides; fA, fC, fG, fU=2′-F ribonucleosides; s=phosphorothioate, and wherein ademA-GalNAc=

[chemical structure]

[0140] In some aspects, the sense strand comprises the sequence and all of the modifications of 5′-[mCs][mA][fG][mG][fU][mG][mG][fA][mA][fG][mU][fA][fA][mA][fA][mU][fC][mU][mG][mA][mG][mC][mA][mG][mC][mC][mG][ademA-GalNAc][ademA-GalNAc][ademA-GalNAc][mG][mG][mC][mU][mG][mC]-3′ (SEQ ID NO: 850), and wherein the antisense strand comprises the sequence and all of the modifications of 5′-[MePhosphonate-4O-mUs][fCs][fA][fG][fA][mU][fU][mU][mU][fA][mC][mU][mU][fC][mC][fA][mC][mC][fU][mGs][mGs][mG]-3′ (SEQ ID NO: 885), wherein mC, mA, mG, mU=2′-OMe ribonucleosides; fA, fC, fG, fU=2′-F ribonucleosides; s=phosphorothioate, and wherein ademA-GalNAc=

[chemical structure]

[0141] In some aspects, the sense strand comprises the sequence and all of the modifications of 5′-[mAs][mG][fG][mU][fG][mG][mA][fA][mG][fJ][mA][fA][fA][mA][fU][mC][fJ][mG][mA][mA][mG][mC][mA][mG][mC][mC][mG][ademA-GalNAc][ademA-GalNAc][ademA-GalNAc][mG][mG][mC][mU][mG][mC]-3′ (SEQ ID NO: 851), and wherein the antisense strand comprises the sequence and all of the modifications of 5′-[MePhosphonate-4O-mUs][fUs][fC][fA][fG][mA][fU][mU][mU][fU][mA][mC][mU][fU][mC][fC][mA][mC][fC][m Us][mGs][mG]-3′ (SEQ ID NO: 886), wherein mC, mA, mG, mU=2′-OMe ribonucleosides; fA, fC, fG, fU=2′-F ribonucleosides; s=phosphorothioate, and wherein ademA-GalNAc=

[chemical structure]

[0142] In some aspects, the sense strand comprises the sequence and all of the modifications of 5′-[mAs][mG][fG][mA][fA][mA][mU][fA][mA][fA][mA][fA][fG][mA][fU][mU][fG][mA][mA][mA][mG][mC][mA][mG][mC][mC][mG][ademA-GalNAc][ademA-GalNAc][ademA-GalNAc][mG][mG][mC][mU][mG][mC]-3′ (SEQ ID NO: 868), and wherein the antisense strand comprises the sequence and all of the modifications of 5′-[MePhosphonate-4O-mUs][fUs][fJ][fC][fA][mA][fU][mC][mU][fU][mU][mU][mU][fA][mU][fJ][mU][mC][fC][m Us][mGs][mG]-3′ (SEQ ID NO: 903), wherein mC, mA, mG, mU=2′-OMe ribonucleosides; fA, fC, fG, fU=2′-F ribonucleosides; s=phosphorothioate, and wherein ademA-GalNAc=

[chemical structure]

[0143] In some aspects, the sense strand comprises the sequence and all of the modifications of 5′-[mGs][mG][fA][mA][fA][mU][mA][fA][mA][fA][mA][fG][fA][mU][fU][mG][fA][mA][mA][mA][mG][mC][mA][mG][mC][mC][mG][ademA-GalNAc][ademA-GalNAc][ademA-GalNAc][mG][mG][mC][mU][mG][mC]-3′ (SEQ ID NO: 869), and wherein the antisense strand comprises the sequence and all of the modifications of 5′-[MePhosphonate-4O-mUs][fUs][fU][fU][fC][mA][fA][mU][mC][fU][mU][mU][mU][fU][mA][fJ][mU][mU][fC][m Cs][mGs][mG]-3′ (SEQ ID NO: 904), wherein mC, mA, mG, mU=2′-OMe ribonucleosides; fA, fC, fG, fU=2′-F ribonucleosides; s=phosphorothioate, and wherein ademA-GalNAc=

[chemical structure]

[0144] In some aspects, the sense strand comprises the sequence and all of the modifications of 5′-[mAs][mU][fA][mA][fA][mA][mA][fG][mA][fJ][mU][fG][fA][mA][fA][mC][fC][mC][mA][mA][mG][mC][mA][mG][mC][mC][mG][ademA-GalNAc][ademA-GalNAc][ademA-GalNAc][mG][mG][mC][mU][mG][mC]-3′ (SEQ ID NO: 873), and wherein the antisense strand comprises the sequence and all of the modifications of 5′-[MePhosphonate-4O-mUs][fUs][fG][fG][fG][mU][fU][mU][mC][fA][mA][mU][mC][fU][mU][fU][mU][mU][fA][m Us][mGs][mG]-3′ (SEQ ID NO: 908), wherein mC, mA, mG, mU=2′-OMe ribonucleosides; fA, fC, fG, fU=2′-F ribonucleosides; s=phosphorothioate, and wherein ademA-GalNAc=

[chemical structure]

[0145] In some aspects, the sense strand comprises the sequence and all of the modifications of 5′-[ademCs-C₁₆][mA][fG][mG][fU][mG][mG][fA][mA][fG][mU][fA][fA][mA][fA][mU][fC][mUs][mGs][mA]-3′ (SEQ ID NO: 1682), and wherein the antisense strand comprises the sequence and all of the modifications of 5′-[MePhosphonate-4O-mUs][fCs][fA][fG][fA][mU][fU][mU][mU][fA][mC][mU][mU][fC][mC][fA][mC][mC][fU][mGs][mGs][mG]-3′ (SEQ ID NO: 885), wherein mC, mA, mG, mU=2′-OMe ribonucleosides; fA, fC, fG, fU=2′-F ribonucleosides; s=phosphorothioate, and [ademCs-C₁₆]=cytosine conjugated to C₁₆ hydrocarbon chain:

[chemical structure]

[0146] In some aspects, the disclosure provides a pharmaceutical composition comprising a RNAi oligonucleotide described herein, and a pharmaceutically acceptable carrier, delivery agent or excipient.

[0147] In other aspects, the disclosure provides a method for treating a subject having a disease, disorder or condition associated with MAPT gene expression, the method comprising administering to the subject a therapeutically effective amount of a RNAi oligonucleotide described herein, or pharmaceutical composition thereof, thereby treating the subject.

[0148] In further aspects, the disclosure provides a method of delivering an oligonucleotide to a subject, the method comprising administering a pharmaceutical composition described herein to the subject.

[0149] In yet further aspects, the disclosure provides, a method for reducing MAPT gene expression in a cell, a population of cells or a subject, the method comprising the step of:
[0150] i. contacting the cell or the population of cells with a RNAi oligonucleotide or pharmaceutical composition described herein; or
[0151] ii. administering to the subject a RNAi oligonucleotide or pharmaceutical composition described herein.

[0152] In some aspects, reducing MAPT gene expression comprises reducing an amount or level of MAPT mRNA, an amount or level of Tau protein, or both. In some aspects, a RNAi oligonucleotide or pharmaceutical composition described herein the subject has a disease, disorder, or condition associated with MAPT gene expression. In some aspects, the disease, disorder, or condition associated with MAPT gene expression is AD, frontotemporal dementia (FTD), PSP, PD, Tau protein-associated diseases, primary age-related tauopathy, chronic traumatic encephalopathy, corticobasal degeneration, Lytico-bodig disease, ganglioglioma, meningioangiomatosis, postencephalitic parkinsonism, or subacute sclerosing panencephalitis.

[0153] In any of the foregoing or related aspects, MAPT gene expression is reduced in tissue of one or more regions of the CNS, wherein the tissue is associated with AD. In some aspects, tissue associated with AD is selected from: prefrontal cortex, motor cortex, temporal cortex, parietal cortex, and hippocampus. In some aspects, MAPT gene expression is reduced in tissue of one or more regions of the CNS, wherein the tissue is associated with PSP. In some aspects, tissue associated with PSPy is selected from: caudate nucleus, globus pallidus, thalamus, midbrain tegmentum, substantia nigra, pons, cerebellar white matter, cerebellar dentate nucleus, medulla, cervical spinal cord, thoracic spinal cord, and lumbar spinal cord. In some aspects, MAPT gene expression is reduced in one or more regions of the CNS selected from: cervical spinal cord, thoracic spinal cord, lumbar spinal cord, frontal cortex, temporal cortex, cerebellum, midbrain, occipital cortex, parietal cortex, hippocampus, caudate nucleus, thalamus, brainstem, motor cortex, globus pallidus, midbrain tegmentum, substantia nigra, pons, cerebellar white matter, and cerebellar dentate nucleus.

[0154] In any of the foregoing or related aspects, the RNAi oligonucleotide, or pharmaceutical composition is administered in combination with a second composition or therapeutic agent.

[0155] In other aspects, the disclosure provides use of a RNAi oligonucleotide or pharmaceutical composition described herein in the manufacture of a medicament for the treatment of a disease, disorder, or condition associated with MAPT gene expression.

[0156] In further aspects, the disclosure provides a RNAi oligonucleotide or pharmaceutical composition described herein for use, or adaptable for use, in the treatment of a disease, disorder, or condition associated with MAPT gene expression.

[0157] In some aspects, the disclosure provides a kit comprising the a RNAi oligonucleotide described herein, an optional pharmaceutically acceptable carrier, and a package insert comprising instructions for administration to a subject having a disease, disorder, or condition associated with MAPT gene expression.

[0158] In any of the foregoing or related aspects, the disease, disorder, or condition associated withMAPT gene expression is AD, FTD, PD, PSP, Tau protein-associated diseases, primary age-related tauopathy, chronic traumatic encephalopathy, corticobasal degeneration, Lytico-bodig disease, ganglioglioma, meningioangiomatosis, postencephalitic parkinsonism, or subacute sclerosing panencephalitis.

### BRIEF DESCRIPTION OF THE FIGURES

[0159] The advantages, effects, features, and objects other than those set forth above will become more readily apparent when consideration is given to the detailed description below. Such detailed description refers to the following drawings, where:

[0160] FIGS. 1A and 1B provide graphs depicting the percent (%) of human MAPT mRNA remaining in the liver of mice exogenously expressing human MAPT (hydrodynamic injection model) after treatment with GalNAc-conjugated MAPT oligonucleotides specific for human (Hs) MAPT or human and NHP (Hs-Mf; “double-common”) MAPT. CD-1 mice were dosed subcutaneously with 3 mg/kg of the indicated GalNAc-conjugated MAPT-targeting oligonucleotide formulated in PBS. Four days post-dose, mice were hydrodynamically injected (HDI) with a DNA plasmid encoding human MAPT The level of human MAPT mRNA was determined from livers collected 18 hours later.

[0161] FIGS. 2A and 2B provide graphs depicting the dose response of GalNAc-conjugated MAPT-targeting oligonucleotides selected based on inhibitory efficacy shown in FIGS. 1A-1B in addition to GalNAc-conjugated MAPT-targeting oliognucleotides specific for human (Hs), NHP (Mf), and murine (Mm) MAPT The percent (%) of MAPT mRNA remaining in liver tissue was measured in CD-1 HDI mice as described in FIGS. 1A-1B. Following injection with 0.3 mg/kg, 1.0 mg/kg, or 3.0 mg/kg of the indicated GalNAc-conjugated MAPT-targeting oligonucleotide, percent (%) mRNA remaining was determined in two cohorts, FIG. 2A (Set I) and FIG. 2B (Set II). Hs=construct is human MAPT specific; Hs-Mf=construct is human and monkey MAPT specific.

[0162] FIGS. 3A-3M provide graphs depicting the percent (%) of human MAPT mRNA remaining in the CNS of NHP after treatment with GalNAc-conjugated MAPT-targeting oligonucleotides. NHPs were dosed by intra cisterna magna (i.c.m) injection with 50 mg of the indicated GalNAc-conjugated MAPT-targeting oligonucleotide formulated in artificial cerebrospinal fluid (aCSF) on study days 0 and 7. The level of MAPT mRNA was determined relative to the percent (%) of MAPT mRNA remaining in aCSF-treated animals. CNS tissues measured included cervical spinal cord (FIG. 3A), thoracic spinal cord (FIG. 3B), lumbar spinal cord (FIG. 3C), frontal cortex (FIG. 3D), temporal cortex (FIG. 3E), cerebellum (FIG. 3F), midbrain (FIG. 3G), occipital cortex (FIG. 3H), parietal cortex (FIG. 3I), hippocampus (FIG. 3J), caudate nucleus (FIG. 3K), thalamus (FIG. 3L), and brainstem (FIG. 3M).

[0163] FIGS. 4A-4B provide schematics of a lipid-conjugated RNAi oligonucleotide (FIG. 4A) and a GalNAc-conjugated RNAi oligonucleotide (FIG. 4B).

[0164] FIGS. 5A-5B provide graphs depicting the percent (%) of NHP (Mf) MAPT mRNA remaining (FIG. 5A) and concentration of oligonucleotide (FIG. 5B) in CNS tissue associated with AD. NHPs were intrathecally administered MAPT-2357 conjugated to a C₁₆ lipid or GalNAc, as shown in the modification patterns of FIGS. 4A-4B. Tissue was collected and analyzed 28 days after administration of the indicated oligonucleotide.

[0165] FIGS. 6A-6B provide graphs depicting the percent (%) of NHP (Mf) MAPT mRNA remaining (FIG. 6A) and concentration of oligonucleotide (FIG. 6B) in CNS tissue associated with PSP. NHPs were intrathecally administered MAPT-2357 conjugated to a C₁₆ lipid or GalNAc, as shown in the modification patterns of FIGS. 4A-4B. Tissue was collected and analyzed 28 days after administration of the indicated oligonucleotide.

### DETAILED DESCRIPTION

[0166] According to some aspects, the disclosure provides oligonucleotides such as RNAi oligonucleotides that reduce MAPT gene expression in the CNS. In some embodiments, the oligonucleotides provided herein are designed to treat diseases associated with MAPT gene expression in the CNS. In some respects, the disclosure provides methods of treating a disease associated with MAPT by reducing MAPT gene expression in cells (e.g., cells of the CNS).

[0167] Oligonucleotide Inhibitors of MAPT Gene Expression

[0168] The disclosure provides, inter alia, oligonucleotides that inhibit MAPT gene expression (e.g., RNAi oligonucleotides). In some embodiments, the oligonucleotide that inhibits MAPT gene expression is targeted to a MAPT mRNA.

[0169] MAPT Target Sequences

[0170] In some embodiments, an oligonucleotide herein (e.g., a RNAi oligonucleotide) is targeted to a target sequence comprising a MAPT mRNA. In some embodiments, the oligonucleotide is targeted to a target sequence within a MAPT mRNA sequence.

[0171] In some embodiments, the oligonucleotide corresponds to a target sequence within a MAPT mRNA sequence. In some embodiments, the oligonucleotide, or a portion, fragment, or strand thereof (e.g., an antisense strand or a guide strand of a RNAi oligonucleotide) binds or anneals to a target sequence comprising MAPT mRNA, thereby inhibiting MAPT gene expression.

[0172] In some embodiments, the oligonucleotide is targeted to a MAPT target sequence for the purpose of inhibiting MAPT gene expression in vivo. In some embodiments, the amount or extent of inhibition of MAPT gene expression by the oligonucleotide targeted to a MAPT target sequence correlates with the potency of the oligonucleotide. In some embodiments, the amount or extent of MAPT gene expression inhibition by the oligonucleotide targeted to a MAPT target sequence correlates with the amount or extent of therapeutic benefit in a subject or patient having a disease, disorder, or condition associated with MAPT gene expression treated with the oligonucleotide.

[0173] In some embodiments, a sense strand of the oligonucleotide comprises a MAPT target sequence. In some embodiments, a portion or region of the sense strand of the oligonucleotide (e.g., a RNAi oligonucleotide) comprises a MAPT target sequence. In some embodiments, the MAPT target sequence comprises, or consists of, a nucleotide sequence of any one of SEQ ID NOs: 912-1295. In some embodiments, the MAPT target sequence comprises, or consists of, a nucleotide sequence of any one of SEQ ID NOs: 1125, 1127, 1130, 1019, 1031, 1044, 1064, 1065, 1067, 1083, 915, 1095, 1096, 1102, 1110, 923, 925, 1025, 1039, 1049, 1061, 1070, 1072, 1075, 1081, 1108, 1111, 1114, 1119, 1120, 1121, 1122, 1123, 1124, and 924. In some embodiments, the MAPT target sequence comprises, or consists of, a nucleotide sequence of any one of SEQ ID NOs: 1061, 1108, 1119, 1120, 1124, 1130, 1065, 1095, 1096, and 1102. In some embodiments, the MAPT target sequence comprises, or consists of, a nucleotide sequence of any one of SEQ ID NOs: 1130, 1095, 1096, 1119, 1120, and 1124. In some embodiments, the MAPT target sequence comprises the nucleotide sequence set forth in SEQ ID NO: 1130. In some embodiments, the MAPT target sequence comprises the nucleotide sequence set forth in SEQ ID NO: 1095. In some embodiments, the MAPT target sequence comprises the nucleotide sequence set forth in SEQ ID NO: 1096. In some embodiments, the MAPT target sequence comprises the nucleotide sequence set forth in SEQ ID NO: 1119. In some embodiments, the MAPT target sequence comprises the nucleotide sequence set forth in SEQ ID NO: 1120. In some embodiments, the MAPT target sequence comprises the nucleotide sequence set forth in SEQ ID NO: 1124.

[0174] MAPT mRNA Targeting Sequences

[0175] In some embodiments, an oligonucleotide herein (e.g., a RNAi oligonucleotide) has a region of complementarity to MAPT mRNA (e.g., within a target sequence of MAPT mRNA) for purposes of targeting the mRNA in cells and inhibiting its expression. In some embodiments, the oligonucleotide comprises a MAPT mRNA target sequence (e.g., an antisense strand or a guide strand of a ds oligonucleotide such as a RNAi oligonucleotide) having a region of complementarity that binds or anneals to a MAPT target sequence by complementary (Watson-Crick) base pairing. The targeting sequence or region of complementarity is generally of suitable length and base content to enable binding or annealing of the oligonucleotide (or a strand thereof) to a MAPT mRNA for purposes of inhibiting its expression. In some embodiments, the targeting sequence or region of complementarity is at least about 12, at least about 13, at least about 14, at least about 15, at least about 16, at least about 17, at least about 18, at least about 19, at least about 20, at least about 21, at least about 22, at least about 23, at least about 24, at least about 25, at least about 26, at least about 27, at least about 28, at least about 29 or at least about 30 nucleotides in length. In some embodiments, the targeting sequence or region of complementarity is at least 12, at least 13, at least 14, at least 15, at least 16, at least 17, at least 18, at least 19, or at least 20 nucleotides. In some embodiments, the targeting sequence or region of complementarity is about 12 to about 30 (e.g., 12 to 30, 12 to 22, 15 to 25, 17 to 21, 18 to 27, 19 to 27, or 15 to 30) nucleotides in length. In some embodiments, the targeting sequence or region of complementarity is about 12, 13, 14, 15, 16, 17, 18, 19, 20, 21, 22, 23, 24, 25, 26, 27, 28, 29, or 30 nucleotides in length. In some embodiments, the targeting sequence or region of complementarity is 18 nucleotides in length. In some embodiments, the targeting sequence or region of complementarity is 19 nucleotides in length. In some embodiments, the targeting sequence or region of complementarity is 20 nucleotides in length. In some embodiments, the targeting sequence or region of complementarity is 21 nucleotides in length. In some embodiments, the targeting sequence or region of complementarity is 22 nucleotides in length. In some embodiments, the targeting sequence or region of complementarity is 23 nucleotides in length. In some embodiments, the targeting sequence or region of complementarity is 24 nucleotides in length. In some embodiments, the oligonucleotide comprises a target sequence or region of complementarity complementary to a sequence of any one of SEQ ID NOs: 912-1295, and the targeting sequence or region of complementarity is 18 nucleotides in length. In some embodiments, the oligonucleotide comprises a target sequence or region of complementarity complementary to a sequence of any one of SEQ ID NOs: 912-1295, and the targeting sequence or region of complementarity is 19 nucleotides in length. In some embodiments, the oligonucleotide comprises a target sequence or region of complementarity complementary to a sequence of any one of SEQ ID NOs: 1-384, and the targeting sequence or region of complementarity is 20 nucleotides in length. In some embodiments, the oligonucleotide comprises a target sequence or region of complementarity complementary to a sequence of any one of SEQ ID NOs: 1-384, and the targeting sequence or region of complementarity is 21 nucleotides in length. In some embodiments, the oligonucleotide comprises a target sequence or region of complementarity complementary to a sequence of any one of SEQ ID NOs: 1-384, and the targeting sequence or region of complementarity is 22 nucleotides in length. In some embodiments, the oligonucleotide comprises a target sequence or region of complementarity complementary to a sequence of any one of SEQ ID NOs: 1-384, and the targeting sequence or region of complementarity is 23 nucleotides in length. In some embodiments, the oligonucleotide comprises a target sequence or region of complementarity complementary to a sequence of any one of SEQ ID NOs: 1-384, and the targeting sequence or region of complementarity is 24 nucleotides in length.

[0176] In some embodiments, the oligonucleotide comprises a targeting sequence or a region of complementarity (e.g., an antisense strand or a guide strand of a ds oligonucleotide) that is fully complementary to a MAPT mRNA target sequence. In some embodiments, the targeting sequence or region of complementarity is partially complementary to a MAPT mRNA target sequence. In some embodiments, the oligonucleotide comprises a targeting sequence or region of complementarity that is fully complementary to a sequence of any one of SEQ ID NOs: 912-1295. In some embodiments, the oligonucleotide comprises a targeting sequence or region of complementarity that is partially complementary to a sequence of any one of SEQ ID NOs: 912-1295. In some embodiments, the oligonucleotide comprises a targeting sequence or region of complementarity that is fully complementary to a sequence of any one of SEQ ID NOs: 1125, 1127, 1130, 1019, 1031, 1044, 1064, 1065, 1067, 1083, 915, 1095, 1096, 1102, 1110, 923, 925, 1025, 1039, 1049, 1061, 1070, 1072, 1075, 1081, 1108, 1111, 1114, 1119, 1120, 1121, 1122, 1123, 1124, or 924. In some embodiments, the oligonucleotide comprises a targeting sequence or region of complementarity that is partially complementary to a sequence of any one of SEQ ID NOs: 1125, 1127, 1130, 1019, 1031, 1044, 1064, 1065, 1067, 1083, 915, 1095, 1096, 1102, 1110, 923, 925, 1025, 1039, 1049, 1061, 1070, 1072, 1075, 1081, 1108, 1111, 1114, 1119, 1120, 1121, 1122, 1123, 1124, or 924. In some embodiments, the oligonucleotide comprises a targeting sequence or region of complementarity that is fully complementary to a sequence of any one of SEQ ID NOs: 1061, 1108, 1119, 1120, 1124, 1130, 1065, 1095, 1096, or 1102. In some embodiments, the oligonucleotide comprises a targeting sequence or region of complementarity that is partially complementary to a sequence of any one of SEQ ID NOs: 1061, 1108, 1119, 1120, 1124, 1130, 1065, 1095, 1096, or 1102. In some embodiments, the oligonucleotide comprises a targeting sequence or region of complementarity that is fully complementary to a sequence of any one of SEQ ID NOs: 1130, 1095, 1096, 1119, 1120, and 1124. In some embodiments, the oligonucleotide comprises a targeting sequence or region of complementarity that is partially complementary to a sequence of any one of SEQ ID NOs: 1130, 1095, 1096, 1119, 1120, and 1124. In some embodiments, the oligonucleotide comprises a targeting sequence or region of complementarity that is fully complementary to the sequence set forth in SEQ ID NO: 1130. In some embodiments, the oligonucleotide comprises a targeting sequence or region of complementarity that is fully complementary to the sequence set forth in SEQ ID NO: 1095. In some embodiments, the oligonucleotide comprises a targeting sequence or region of complementarity that is fully complementary to the sequence set forth in SEQ ID NO: 1096. In some embodiments, the oligonucleotide comprises a targeting sequence or region of complementarity that is fully complementary to the sequence set forth in SEQ ID NO: 1119. In some embodiments, the oligonucleotide comprises a targeting sequence or region of complementarity that is fully complementary to the sequence set forth in SEQ ID NO: 1120. In some embodiments, the oligonucleotide comprises a targeting sequence or region of complementarity that is fully complementary to the sequence set forth in SEQ ID NO: 1124. In some embodiments, the oligonucleotide comprises a targeting sequence or region of complementarity that is partially complementary to a sequence of any one of SEQ ID NOs: 1130. In some embodiments, the oligonucleotide comprises a targeting sequence or region of complementarity that is partially complementary to the sequence of SEQ ID NO: 1095. In some embodiments, the oligonucleotide comprises a targeting sequence or region of complementarity that is partially complementary to the sequence of SEQ ID NO: 1096. In some embodiments, the oligonucleotide comprises a targeting sequence or region of complementarity that is partially complementary to the sequence of SEQ ID NO: 1119. In some embodiments, the oligonucleotide comprises a targeting sequence or region of complementarity that is partially complementary to the sequence of SEQ ID NO: 1120. In some embodiments, the oligonucleotide comprises a targeting sequence or region of complementarity that is partially complementary to the sequence of SEQ ID NO: 1124.

[0177] In some embodiments, the oligonucleotide comprises a targeting sequence or region of complementarity that is complementary to a contiguous sequence of nucleotides comprising a MAPT mRNA, wherein the contiguous sequence of nucleotides is about 12 to about 30 nucleotides in length (e.g., 12 to 30, 12 to 28, 12 to 26, 12 to 24, 12 to 20, 12 to 18, 12 to 16, 14 to 22, 16 to 20, 18 to 20, or 18 to 19 nucleotides in length). In some embodiments, the oligonucleotide comprises a targeting sequence or region of complementarity that is complementary to a contiguous sequence of nucleotides comprising a MAPT mRNA, wherein the contiguous sequence of nucleotides is 10, 11, 12, 13, 14, 15, 16, 17, 18, 19, or 20 nucleotides in length. In some embodiments, the oligonucleotide comprises a targeting sequence or region of complementarity that is complementary to a contiguous sequence of nucleotides comprising a MAPT mRNA, wherein the contiguous sequence of nucleotides is 19 nucleotides in length. In some embodiments, the oligonucleotide comprises a targeting sequence or region of complementarity that is complementary to a contiguous sequence of nucleotides comprising a MAPT mRNA, wherein the contiguous sequence of nucleotides is 20 nucleotides in length.

[0178] In some embodiments, the oligonucleotide comprises a targeting sequence or a region of complementarity that is complementary to a contiguous sequence of nucleotides of any one of SEQ ID NOs: 912-1295, optionally where the contiguous sequence of nucleotides is 19 nucleotides in length. In some embodiments, the oligonucleotide comprises a targeting sequence or a region of complementarity that is complementary to a contiguous sequence of nucleotides of any one of SEQ ID NOs: 1125, 1127, 1130, 1019, 1031, 1044, 1064, 1065, 1067, 1083, 915, 1095, 1096, 1102, 1110, 923, 925, 1025, 1039, 1049, 1061, 1070, 1072, 1075, 1081, 1108, 1111, 1114, 1119, 1120, 1121, 1122, 1123, 1124, and 924, optionally wherein the contiguous sequence of nucleotides is 19 nucleotides in length. In some embodiments, the oligonucleotide comprises a targeting sequence or a region of complementarity that is complementary to a contiguous sequence of nucleotides of any one of SEQ ID NOs: 1061, 1108, 1119, 1120, 1124, 1130, 1065, 1095, 1096, and 1102, optionally where the contiguous sequence of nucleotides is 19 nucleotides in length. In some embodiments, the oligonucleotide comprises a targeting sequence or a region of complementarity that is complementary to a contiguous sequence of nucleotides of SEQ ID NO: 1130, 1095, 1096, 1119, 1120, and 1124, optionally where the contiguous sequence of nucleotides is 19 nucleotides in length.

[0179] In some embodiments, the targeting sequence or region of complementarity of the oligonucleotide is complementary to contiguous nucleotides of a sequence as set forth in any one of SEQ ID NOs: 912-1295 and spans the entire length of the antisense strand. In some embodiments, the targeting sequence or region of complementarity of the oligonucleotide is complementary to contiguous nucleotides of a sequence as set forth in any one of SEQ ID NOs: 912-1295 and spans a portion of the entire length of an antisense strand. In some embodiments, the oligonucleotide comprises a region of complementarity (e.g., on an antisense strand of a ds oligonucleotide) that is at least partially (e.g., fully) complementary to a contiguous stretch of nucleotides spanning nucleotides 1-20 of a sequence as set forth in any one of SEQ ID NOs: 912-1295. In some embodiments, the targeting sequence or region of complementarity of the oligonucleotide is complementary to contiguous nucleotides of a sequence as set forth in any one of SEQ ID NOs: 1-384 and spans the entire length of an antisense strand. In some embodiments, the region of complementarity of the oligonucleotide is complementary to contiguous nucleotides of a sequence as set forth in any one of SEQ ID NOs: 1-384 and spans a portion of the entire length of an antisense strand. In some embodiments, the oligonucleotide comprises the region of complementarity (e.g., on an antisense strand of a ds oligonucleotide) that is at least partially (e.g., fully) complementary to a contiguous stretch of nucleotides spanning nucleotides 1-19 of a sequence as set forth in any one of SEQ ID NOs: 1-384.

[0180] In some embodiments, the oligonucleotide comprises a targeting sequence or region of complementarity having one or more base pair (bp) mismatches with the corresponding MAPT mRNA target sequence. In some embodiments, the targeting sequence or region of complementarity may have up to about 1, up to about 2, up to about 3, up to about 4, up to about 5, etc. mismatches with the corresponding MAPT mRNA target sequence provided that the ability of the targeting sequence or region of complementarity to bind or anneal to MAPT mRNA under appropriate hybridization conditions and/or the ability of the oligonucleotide to inhibit MAPT gene expression is maintained. Alternatively, in some embodiments, the targeting sequence or region of complementarity comprises no more than 1, no more than 2, no more than 3, no more than 4, or no more than 5 mismatches with the corresponding MAPT mRNA target sequence provided that the ability of the targeting sequence or region of complementarity to bind or anneal to MAPT mRNA under appropriate hybridization conditions and/or the ability of the oligonucleotide to inhibit MAPT gene expression is maintained. In some embodiments, the oligonucleotide comprises a targeting sequence or region of complementarity having 1 mismatch with the corresponding target sequence. In some embodiments, the oligonucleotide comprises a targeting sequence or region of complementarity having 2 mismatches with the corresponding target sequence. In some embodiments, the oligonucleotide comprises a targeting sequence or region of complementarity having 3 mismatches with the corresponding target sequence. In some embodiments, the oligonucleotide comprises a targeting sequence or region of complementarity having 4 mismatches with the corresponding target sequence. In some embodiments, the oligonucleotide comprises a targeting sequence or region of complementarity having 5 mismatches with the corresponding target sequence. In some embodiments, the oligonucleotide comprises a targeting sequence or region of complementarity more than one mismatch (e.g., 2, 3, 4, 5, or more mismatches) with the corresponding target sequence, wherein at least 2 (e.g., all) of the mismatches are positioned consecutively (e.g., 2, 3, 4, 5, or more mismatches in a row), or wherein the mismatches are interspersed in any position throughout the targeting sequence or region of complementarity. In some embodiments, the oligonucleotide comprises a targeting sequence or region of complementarity more than one mismatch (e.g., 2, 3, 4, 5, or more mismatches) with the corresponding target sequence, wherein at least 2 (e.g., all) of the mismatches are positioned consecutively (e.g., 2, 3, 4, 5, or more mismatches in a row), or wherein at least one or more non-mismatched base pair is located between the mismatches, or a combination thereof.

[0181] In some embodiments, the oligonucleotide comprises a targeting sequence or a region of complementary that is complementary to a contiguous sequence of nucleotides of any one of SEQ ID NOs: 912-1295, wherein the targeting sequence or region of complementarity may have up to about 1, up to about 2, up to about 3, up to about 4, up to about 5, etc. mismatches with the corresponding MAPT mRNA target sequence. In some embodiments, the oligonucleotide comprises a targeting sequence or a region of complementary that is complementary to a contiguous sequence of nucleotides of any one of SEQ ID NOs: 912-1295, wherein the targeting sequence or region of complementarity may have no more than 1, no more than 2, no more than 3, no more than 4, or no more than 5 mismatches with the corresponding MAPT mRNA target sequence. In some embodiments, the oligonucleotide comprises a targeting sequence or a region of complementary that is complementary to a contiguous sequence of nucleotides of any one of SEQ ID NOs: 1125, 1127, 1130, 1019, 1031, 1044, 1064, 1065, 1067, 1083, 915, 1095, 1096, 1102, 1110, 923, 925, 1025, 1039, 1049, 1061, 1070, 1072, 1075, 1081, 1108, 1111, 1114, 1119, 1120, 1121, 1122, 1123, 1124, and 924, wherein the targeting sequence or region of complementarity may have up to about 1, up to about 2, up to about 3, up to about 4, up to about 5, etc. mismatches with the corresponding MAPT mRNA target sequence. In some embodiments, the oligonucleotide comprises a targeting sequence or a region of complementary that is complementary to a contiguous sequence of nucleotides of any one of SEQ ID NOs: 1125, 1127, 1130, 1019, 1031, 1044, 1064, 1065, 1067, 1083, 915, 1095, 1096, 1102, 1110, 923, 925, 1025, 1039, 1049, 1061, 1070, 1072, 1075, 1081, 1108, 1111, 1114, 1119, 1120, 1121, 1122, 1123, 1124, and 924, wherein the targeting sequence or region of complementarity may have no more than 1, no more than 2, no more than 3, no more than 4, or no more than 5 mismatches with the corresponding MAPT mRNA target sequence. In some embodiments, the oligonucleotide comprises a targeting sequence or a region of complementary that is complementary to a contiguous sequence of nucleotides of any one of SEQ ID NOs: 1061, 1108, 1119, 1120, 1124, 1130, 1065, 1095, 1096, and 1102, wherein the targeting sequence or region of complementarity may have up to about 1, up to about 2, up to about 3, up to about 4, up to about 5, etc. mismatches with the corresponding MAPT mRNA target sequence. In some embodiments, the oligonucleotide comprises a targeting sequence or a region of complementary that is complementary to a contiguous sequence of nucleotides of any one of SEQ ID NOs: 1061, 1108, 1119, 1120, 1124, 1130, 1065, 1095, 1096, and 1102, wherein the targeting sequence or region of complementarity may have no more than 1, no more than 2, no more than 3, no more than 4, or no more than 5 mismatches with the corresponding MAPT mRNA target sequence. In some embodiments, the oligonucleotide comprises a targeting sequence or a region of complementary that is complementary to a contiguous sequence of nucleotides of any one of SEQ ID NOs: 1130, 1095, 1096, 1119, 1120, and 1124, wherein the targeting sequence or region of complementarity may have up to about 1, up to about 2, up to about 3, up to about 4, up to about 5, etc. mismatches with the corresponding MAPT mRNA target sequence. In some embodiments, the oligonucleotide comprises a targeting sequence or a region of complementary that is complementary to a contiguous sequence of nucleotides of any one of SEQ ID NOs: 1130, 1095, 1096, 1119, 1120, and 1124, wherein the targeting sequence or region of complementarity may have no more than 1, no more than 2, no more than 3, no more than 4, or no more than 5 mismatches with the corresponding MAPT mRNA target sequence. In some embodiments, the oligonucleotide comprises a targeting sequence or a region of complementary that is complementary to a contiguous sequence of nucleotides of SEQ ID NO: 1095, wherein the targeting sequence or region of complementarity may have up to about 1, up to about 2, up to about 3, up to about 4, up to about 5, etc. mismatches with the corresponding MAPT mRNA target sequence. In some embodiments, the oligonucleotide comprises a targeting sequence or a region of complementary that is complementary to a contiguous sequence of nucleotides of SEQ ID NO: 1095, wherein the targeting sequence or region of complementarity may have no more than 1, no more than 2, no more than 3, no more than 4, or no more than 5 mismatches with the corresponding MAPT mRNA target sequence.

[0182] Types of Oligonucleotides

[0183] A variety of oligonucleotide types and/or structures are useful for targeting MAPT mRNA in the methods herein including, but not limited to, RNAi oligonucleotides. Any of the oligonucleotide types described herein or elsewhere are contemplated for use as a framework to incorporate a MAPT mRNA targeting sequence herein for the purposes of inhibiting MAPT gene expression.

[0184] In some embodiments, the oligonucleotides herein inhibit MAPT gene expression by engaging with RNA interference (RNAi) pathways upstream or downstream of Dicer involvement (e.g., a RNAi oligonucleotide). For example, RNAi oligonucleotides have been developed with each strand having sizes of about 19-25 nucleotides with at least one 3′ overhang of about 1 to about 5 nucleotides (see, e.g., U.S. Pat. No. 8,372,968). Longer oligonucleotides also have been developed that are processed by Dicer to generate active RNAi products (see, e.g., U.S. Pat. No. 8,883,996). Further work produced extended ds oligonucleotides where at least one end of at least one strand is extended beyond a duplex targeting region, including structures where one of the strands includes a thermodynamically-stabilizing tetraL structure (see, e.g., U.S. Pat. Nos. 8,513,207 and 8,927,705, as well as Intl. Patent Application Publication No. WO 2010/033225). Such structures may include single-stranded (ss) extensions (on one or both sides of the molecule) as well as ds extensions.

[0185] In some embodiments, the oligonucleotide engages with the RNAi pathway downstream of the involvement of Dicer (e.g., Dicer cleavage). In some embodiments, the oligonucleotide has an overhang (e.g., of 1, 2, or 3 nucleotides in length) in the 3′ end of the sense strand. In some embodiments, the oligonucleotide comprises a 21-nucleotide antisense strand that is antisense to a target mRNA (e.g., MAPT mRNA) and a complementary sense strand, in which both strands anneal to form a 19-bp duplex and 2 nucleotide overhangs at either or both 3′ ends. Longer oligonucleotide designs also are contemplated including oligonucleotides having an antisense strand of 23 nucleotides and a sense strand of 21 nucleotides, where there is a blunt end on the right side of the oligonucleotide (3′ end of sense strand/5′ end of antisense strand) and a two nucleotide 3′ guide strand overhang on the left side of the oligonucleotide (5′ end of the sense strand/3′ end of the antisense strand). In such molecules, there is a 21 bp duplex region. See, e.g., U.S. Pat. Nos. 9,012,138; 9,012,621; and 9,193,753.

[0186] In some embodiments, the oligonucleotide comprises sense and antisense strands that are both in the range of about 17 to about 36 (e.g., 17 to 26, 20 to 25, or 21-23) nucleotides in length. In some embodiments, the oligonucleotide comprises an antisense strand of 19-30 nucleotides in length and a sense strand of 19-50 nucleotides in length, where the antisense and sense strands are separate strands that form an asymmetric duplex region having an overhang of 1-4 nucleotides at the 3′ terminus of the antisense strand. In some embodiments, the oligonucleotide comprises sense and antisense strands that are both in the range of about 19-22 nucleotides in length. In some embodiments, the sense and antisense strands are of equal length. In some embodiments, the oligonucleotide comprises sense and antisense strands, such that there is a 3′ overhang on either the sense strand or the antisense strand, or both the sense and antisense strand. In some embodiments, for oligonucleotides that have sense and antisense strands that are both in the range of about 21-23 nucleotides in length, a 3′ overhang on the sense, antisense, or both is/are 1 or 2 nucleotides in length. In some embodiments, the oligonucleotide has a guide strand of 22 nucleotides and a passenger strand of 20 nucleotides, where there is a blunt end on the right side of the molecule (3′ end of passenger strand/5′ end of guide strand) and a 2 nucleotide 3′ guide strand overhang on the left side of the molecule (5′ end of the passenger strand/3′ end of the guide strand). In such molecules, there is a 20 bp duplex region.

[0187] Other oligonucleotide designs for use with the compositions and methods herein include: 16-mer siRNAs (see, e.g., NUCLEIC ACIDS IN CHEMISTRY AND BIOLOGY, Blackburn (ed.), Royal Society of Chemistry, 2006), shRNAs (e.g., having 19 bp or shorter stems; see, e.g., Moore et al. (2010) METHODS MOL. BIOL. 629:141-58), blunt siRNAs (e.g., of 19 bps in length; see, e.g., Kraynack & Baker (2006) RNA 12:163-76), asymmetrical siRNAs (aiRNA; see, e.g., Sun et al. (2008) NAT. BIOTECHNOL. 26:1379-82), asymmetric shorter-duplex siRNA (see, e.g., Chang et al. (2009) MOL. THER. 17:725-732), fork siRNAs (see, e.g., Hohjoh (2004) FEBS LETT. 557:193-98), single-stranded siRNAs (Elsner (2012) NAT. BIOTECHNOL. 30:1063), dumbbell-shaped circular siRNAs (see, e.g., Abe et al. (2007) J. AM. CHEM. SOC. 129:15108-09), and small internally segmented interfering RNA (siRNA; see, e.g., Bramsen et al. (2007) NUCLEIC ACIDS RES. 35:5886-97). Further non-limiting examples of an oligonucleotide structure that may be used in some embodiments to reduce or inhibit the expression of MAPT are microRNA (miRNA), short hairpin RNA (shRNA), and short siRNA (see, e.g., Hamilton et al. (2002) EMBO J. 21:4671-79; see also, US Patent Application Publication No. 2009/0099115).

[0188] Still, in some embodiments, the oligonucleotide for reducing or inhibiting MAPT gene expression herein is ss. Such structures may include, but are not limited to, ss RNAi molecules. Recent efforts have demonstrated the activity of ss RNAi molecules (see, e.g., Matsui et al. (2016) Mol. Ther. 24:946-955). However, in some embodiments, the oligonucleotide is an antisense oligonucleotide (ASO). An ASO is a ss oligonucleotide that has a nucleobase sequence which, when written or depicted in the 5′ to 3′ direction, comprises the reverse complement of a targeted segment of a particular nucleic acid and is suitably modified (e.g., as a gapmer) so as to induce RNaseH-mediated cleavage of its target RNA in cells or (e.g., as a mixmer) so as to inhibit translation of the target mRNA in cells. ASOs for use herein may be modified in any suitable manner known in the art including, for example, as shown in U.S. Pat. No. 9,567,587 (including, e.g., length, sugar moieties of the nucleobase (pyrimidine, purine), and alterations of the heterocyclic portion of the nucleobase). Further, ASOs have been used for decades to reduce expression of specific target genes (see, e.g., Bennett et al. (2017) Annu. Rev. Pharmacol. 57:81-105).

[0189] In some embodiments, the ASO shares a region of complementarity with MAPT mRNA. In some embodiments, the ASO targets various areas of the human MAPT identified as NM_001123066.3. In some embodiments, the ASO is about 15-50 nucleotides in length. In some embodiments, the ASO is about 15-25 nucleotides in length. In some embodiments, the ASO is 22 nucleotides in length. In some embodiments, the ASO is complementary to any one of SEQ ID NOs: 912-1295. In some embodiments, the ASO is at least 15 contiguous nucleotides in length. In some embodiments, the ASO is at least 19 contiguous nucleotides in length. In some embodiments, the ASO is at least 20 contiguous nucleotides in length. In some embodiments, the ASO differs by 1, 2, or 3 nucleotides from the target sequence.

[0190] Double-Stranded RNAi Oligonucleotides

[0191] In some aspects, the disclosure provides ds RNAi oligonucleotides for targeting MAPT mRNA and inhibiting MAPT gene expression (e.g., via the RNAi pathway) comprising a sense strand (also referred to herein as a passenger strand) and an antisense strand (also referred to herein as a guide strand). In some embodiments, the sense strand and antisense strand are separate strands and are not covalently linked. In some embodiments, the sense strand and the antisense strand are covalently linked. In some embodiments, the sense strand and the antisense strand form a duplex region, wherein the sense strand and the antisense strand, or a portion thereof, binds with one another in a complementary fashion (e.g., by Watson-Crick base pairing).

[0192] In some embodiments, the sense strand has a first region (R1) and a second region (R2), wherein R2 comprises a first subregion (S1), a L (e.g., tetraL or triL), and a second subregion (S2), wherein L is located between S1 and S2, and wherein S1 and S2 form a second duplex (D2). D2 may have various lengths. In some embodiments, D2 is about 1 to about 6 bp in length. In some embodiments, D2 is 2-6, 3-6, 4-6, 5-6, 1-5, 2-5, 3-5, or 4-5 bp in length. In some embodiments, D2 is 1, 2, 3, 4, 5, or 6 bp in length. In some embodiments, D2 is 6 bp in length.

[0193] In some embodiments, R1 of the sense strand and the antisense strand form a first duplex (D1). In some embodiments, D1 is at least about 15 (e.g., at least 15, at least 16, at least 17, at least 18, at least 19, at least 20, or at least 21) nucleotides in length. In some embodiments, D1 is in the range of about 12 to about 30 nucleotides in length (e.g., 12 to 30, 12 to 27, 15 to 22, 18 to 22, 18 to 25, 18 to 27, 18 to 30, or 21 to 30 nucleotides in length). In some embodiments, D1 is at least 12 nucleotides in length (e.g., at least 12, at least 15, at least 20, at least 25, or at least 30 nucleotides in length). In some embodiments, D1 is 12, 13, 14, 15, 16, 17, 18, 19, 20, 21, 22, 23, 24, 25, 26, 27, 28, 29, or 30 nucleotides in length. In some embodiments, D1 is 19 nucleotides in length. In some embodiments, D1 is 20 nucleotides in length. In some embodiments, D1 comprising the sense strand and the antisense strand does not span the entire length of the sense strand and/or the antisense strand. In some embodiments, D1 comprising the sense strand and the antisense strand spans the entire length of either the sense strand or the antisense strand or both. In certain embodiments, D1 comprising the sense strand and the antisense strand spans the entire length of both the sense strand and the antisense strand.

[0194] In some embodiments, a sense strand described here is 36 nucleotides in length and positions are numbered 1-36 from 5′ to 3′. In some embodiments, an antisense strand described herein is 22 nucleotides in length and positions are numbered 1-22 from 5′ to 3′. In some embodiments, position numbers described herein adhere to this numbering format.

[0195] In some embodiments, the RNAi oligonucleotide comprises a sense strand having a sequence of any one of SEQ ID NOs: 1-384 and an antisense strand comprising a complementary sequence of any one of SEQ ID NOs: 385-768. In some embodiments, the RNAi oligonucleotide comprises a sense strand having a sequence of SEQ ID NOs: 912-1295 and an antisense strand comprising a complementary sequence of any one of SEQ ID NOs: 1296-1679.

[0196] In some embodiments, the RNAi oligonucleotide comprises a sense strand having a sequence of any one of SEQ ID NOs: 769-803 and an antisense strand comprising a complementary sequence of any one of SEQ ID NOs: 804-838. In some embodiments, the RNAi oligonucleotide comprises a sense strand having a sequence of any one of SEQ ID NOs: 769-803 and 1681 and an antisense strand comprising a complementary sequence of any one of SEQ ID NOs: 804-838.

[0197] In some embodiments, the RNAi oligonucleotide comprises a sense strand and an antisense strand comprising nucleotide sequences selected from:
[0198] a) SEQ ID NOs: 769 and 804, respectively;
[0199] b) SEQ ID NOs: 770 and 805, respectively;
[0200] c) SEQ ID NOs: 771 and 806, respectively;
[0201] d) SEQ ID NOs: 772 and 807, respectively;
[0202] e) SEQ ID NOs: 773 and 808, respectively;
[0203] f) SEQ ID NOs: 774 and 809, respectively;
[0204] g) SEQ ID NOs: 775 and 810, respectively;
[0205] h) SEQ ID NOs: 776 and 811, respectively;
[0206] i) SEQ ID NOs: 777 and 812, respectively;
[0207] j) SEQ ID NOs: 778 and 813, respectively;
[0208] k) SEQ ID NOs: 779 and 814, respectively;
[0209] l) SEQ ID NOs: 780 and 815, respectively;
[0210] m) SEQ ID NOs: 781 and 816, respectively;
[0211] n) SEQ ID NOs: 782 and 817, respectively;
[0212] o) SEQ ID NOs: 783 and 818, respectively;
[0213] p) SEQ ID NOs: 784 and 819, respectively;
[0214] q) SEQ ID NOs: 785 and 820, respectively;
[0215] r) SEQ ID NOs: 786 and 821, respectively;
[0216] s) SEQ ID NOs: 787 and 822, respectively;
[0217] t) SEQ ID NOs: 788 and 823, respectively;
[0218] u) SEQ ID NOs: 789 and 824, respectively;
[0219] v) SEQ ID NOs: 790 and 825, respectively;
[0220] w) SEQ ID NOs: 791 and 826, respectively;
[0221] x) SEQ ID NOs: 792 and 827, respectively;
[0222] y) SEQ ID NOs: 793 and 828, respectively;
[0223] z) SEQ ID NOs: 794 and 829, respectively;
[0224] aa) SEQ ID NOs: 795 and 830, respectively;
[0225] bb) SEQ ID NOs: 796 and 831, respectively;
[0226] cc) SEQ ID NOs: 797 and 832, respectively;
[0227] dd) SEQ ID NOs: 798 and 833, respectively;
[0228] ee) SEQ ID NOs: 799 and 834, respectively;
[0229] ff) SEQ ID NOs: 800 and 835, respectively;
[0230] gg) SEQ ID NOs: 801 and 836, respectively;
[0231] hh) SEQ ID NOs: 802 and 837, respectively;
[0232] ii) SEQ ID NOs: 803 and 838, respectively; and
[0233] jj) SEQ ID NOs: 1681 and 815, respectively.

[0234] In some embodiments, the RNAi oligonucleotide comprises a sense strand and an antisense strand comprising nucleotide sequences selected from:
[0235] a) SEQ ID NOs: 771 and 806, respectively;
[0236] b) SEQ ID NOs: 776 and 811, respectively;
[0237] c) SEQ ID NOs: 780 and 815, respectively;
[0238] d) SEQ ID NOs: 781 and 816, respectively;
[0239] e) SEQ ID NOs: 782 and 817, respectively;
[0240] f) SEQ ID NOs: 790 and 825, respectively;
[0241] g) SEQ ID NOs: 795 and 830, respectively;
[0242] h) SEQ ID NOs: 798 and 833, respectively;
[0243] i) SEQ ID NOs: 799 and 834, respectively;
[0244] j) SEQ ID NOs: 803 and 838, respectively; and
[0245] k) SEQ ID NOs: 1681 and 815, respectively.

[0246] In some embodiments, the RNAi oligonucleotide comprises a sense strand and an antisense strand comprising nucleotide sequences selected from:
[0247] a) SEQ ID NOs: 771 and 806, respectively;
[0248] b) SEQ ID NOs: 780 and 815, respectively;
[0249] c) SEQ ID NOs: 781 and 816, respectively;
[0250] d) SEQ ID NOs: 798 and 833, respectively;
[0251] e) SEQ ID NOs: 799 and 834, respectively;
[0252] f) SEQ ID NOs: 803 and 838, respectively; and
[0253] g) SEQ ID NOs: 1681 and 815, respectively.

[0254] In some embodiments, the sense strand comprises the sequence of SEQ ID NO: 771, and the antisense strand comprises the sequence of SEQ ID NO: 806. In some embodiments, the sense strand comprises the sequence of SEQ ID NO: 780, and the antisense strand comprises the sequence of SEQ ID NO: 815. In some embodiments, the sense strand comprises the sequence of SEQ ID NO: 781, and the antisense strand comprises the sequence of SEQ ID NO: 816. In some embodiments, the sense strand comprises the sequence of SEQ ID NO: 798, and the antisense strand comprises the sequence of SEQ ID NO: 833. In some embodiments, the sense strand comprises the sequence of SEQ ID NO: 799, and the antisense strand comprises the sequence of SEQ ID NO: 834. In some embodiments, the sense strand comprises the sequence of SEQ ID NO: 803, and the antisense strand comprises the sequence of SEQ ID NO: 838. In some embodiments, the sense strand comprises the sequence of SEQ ID NO: 1681, and the antisense strand comprises the sequence of SEQ ID NO: 815.

[0255] It should be appreciated that, in some embodiments, sequences presented in the Sequence Listing may be referred to in describing the structure of the oligonucleotide (e.g., a RNAi oligonucleotide) or other nucleic acid. In such embodiments, the actual oligonucleotide or other nucleic acid may have one or more alternative nucleotides (e.g., a RNA counterpart of a DNA nucleotide or a DNA counterpart of an RNA nucleotide) and/or one or more modified nucleotides and/or one or more modified internucleotide linkages and/or one or more other modification when compared with the specified sequence while retaining essentially same or similar complementary properties as the specified sequence.

[0256] In some embodiments, a RNAi oligonucleotide herein comprises a 25-nucleotide sense strand and a 27-nucleotide antisense strand that when acted upon by a Dicer enzyme results in an antisense strand that is incorporated into the mature RNA-induced silencing complex (RISC). In some embodiments, the 25-nucleotide sense strand comprises a sequence selected from SEQ ID NOs: 1-384. In some embodiments, the 27-nucleotide antisense strand comprises a sequence selected from SEQ ID NOs: 385-768. In some embodiments, the sense strand of the RNAi oligonucleotide is longer than 27 nucleotides (e.g., 28, 29, 30, 31, 32, 33, 34, 35, 36, 37, 38, 39, 40, 41, 42, 43, 44, 45, 46, 47, 48, 49, or 50 nucleotides). In some embodiments, the sense strand of the RNAi oligonucleotide is longer than 25 nucleotides (e.g., 26, 27, 28, 29 or 30 nucleotides). In some embodiments, the sense strand of the RNAi oligonucleotide comprises a nucleotide sequence selected from SEQ ID NOs: 912-1295, wherein the nucleotide sequence is longer than 27 nucleotides (e.g., 28, 29, 30, 31, 32, 33, 34, 35, 36, 37, 38, 39, 40, 41, 42, 43, 44, 45, 46, 47, 48, 49, or 50 nucleotides). In some embodiments, the sense strand of the RNAi oligonucleotide comprises a nucleotide sequence selected from SEQ ID NOs: 912-1295, wherein the nucleotide sequence is longer than 25 nucleotides (e.g., 26, 27, 28, 29, or 30 nucleotides).

[0257] In some embodiments, the RNAi oligonucleotide has one 5′ end that is thermodynamically less stable when compared to the other 5′ end. In some embodiments, an asymmetric RNAi oligonucleotide is provided that comprises a blunt end at the 3′ end of a sense strand and a 3′ overhang at the 3′ end of an antisense strand. In some embodiments, the 3′ overhang on the antisense strand is about 1-8 nucleotides in length (e.g., 1, 2, 3, 4, 5, 6, 7, or 8 nucleotides in length). Typically, the RNAi oligonucleotide has a two-nucleotide overhang on the 3′ end of the antisense (guide) strand; however, other overhangs are possible. In some embodiments, the overhang is a 3′ overhang comprising a length of between about 1 to about 6 nucleotides, optionally 1 to 5, 1 to 4, 1 to 3, 1 to 2, 2 to 6, 2 to 5, 2 to 4, 2 to 3, 3 to 6, 3 to 5, 3 to 4, 4 to 6, 4 to 5, 5 to 6 nucleotides, or 1, 2, 3, 4, 5 or 6 nucleotides. However, in some embodiments, the overhang is a 5′ overhang comprising a length of between about 1 to about 6 nucleotides, optionally 1 to 5, 1 to 4, 1 to 3, 1 to 2, 2 to 6, 2 to 5, 2 to 4, 2 to 3, 3 to 6, 3 to 5, 3 to 4, 4 to 6, 4 to 5, 5 to 6 nucleotides, or 1, 2, 3, 4, 5, or 6 nucleotides. In some embodiments, the RNAi oligonucleotide comprises a targeting sequence or a region of complementary that is complementary to a contiguous sequence of nucleotides of any one of SEQ ID NOs: 912-1295, and a 5′ overhang comprising a length of between about 1 and about 6 nucleotides. In some embodiments, the RNAi oligonucleotide comprises a sense strand comprising a nucleotide sequence selected from SEQ ID NOs: 912-1295, wherein the RNAi oligonucleotide comprises a 5′ overhang comprising a length of between about 1 and about 6 nucleotides. In some embodiments, the RNAi oligonucleotide comprises an antisense strand comprising a nucleotide sequence selected from SEQ ID NOs: 1296-1679, wherein the RNAi oligonucleotide comprises a 5′ overhang comprising a length of between about 1 and about 6 nucleotides. In some embodiments, the RNAi oligonucleotide comprises a sense strand comprising a nucleotide sequence selected from SEQ ID NOs: 912-1295 and antisense strand comprising a nucleotide sequence selected from SEQ ID NOs: 1296-1679, wherein the RNAi oligonucleotide comprises a 5′ overhang comprising a length of between about 1 and about 6 nucleotides.

[0258] In some embodiments, two terminal nucleotides on the 3′ end of an antisense strand are modified. In some embodiments, the two terminal nucleotides on the 3′ end of the antisense strand are complementary with the target mRNA (e.g., MAPT mRNA). In some embodiments, the two terminal nucleotides on the 3′ end of the antisense strand are not complementary with the target mRNA. In some embodiments, the two terminal nucleotides on the 3′ end of the antisense strand of a RNAi oligonucleotide herein are unpaired. In some embodiments, the two terminal nucleotides on the 3′ end of the antisense strand of the RNAi oligonucleotide herein comprise an unpaired GG. In some embodiments, the two terminal nucleotides on the 3′ end of the antisense strand of the RNAi oligonucleotide herein are not complementary to the target mRNA. In some embodiments, two terminal nucleotides on each 3′ end of the RNAi oligonucleotide are GG. Typically, one or both of the two terminal GG nucleotides on each 3′ end of the RNAi oligonucleotide is not complementary with the target mRNA. In some embodiments, two terminal nucleotides on each 3′ end of the oligonucleotide are GG. In some embodiments, one or both of the two terminal GG nucleotides on each 3′ end of the RNAi oligonucleotide is not complementary with the target mRNA. In some embodiments, the RNAi oligonucleotide comprises a targeting sequence or a region of complementary that is complementary to a contiguous sequence of nucleotides of any one of SEQ ID NOs: 912-1295, wherein the two terminal nucleotides on the 3′ end of the antisense strand of the oligonucleotide herein comprises an unpaired GG. In some embodiments, the RNAi oligonucleotide comprises an antisense strand comprising a nucleotide sequence selected from SEQ ID NOs: 1296-1679, wherein the two terminal nucleotides on the 3′ end of the antisense strand of the RNAi oligonucleotide comprises an unpaired GG. In some embodiments, the RNAi oligonucleotide comprises a sense strand comprising a nucleotide sequence selected from SEQ ID NOs: 912-1295 and antisense strand comprising a nucleotide sequence selected from SEQ ID NOs: 1296-1679, wherein the two terminal nucleotides on the 3′ end of the antisense strand of the RNAi oligonucleotide comprises an unpaired GG.

[0259] In some embodiments, there is one or more (e.g., 1, 2, 3, 4, or 5) mismatch(s) between a sense strand and an antisense strand comprising the RNAi oligonucleotide. If there is more than one mismatch between the sense and antisense strands, they may be positioned consecutively (e.g., 2, 3, or more in a row), or interspersed throughout the region of complementarity. In some embodiments, the 3′ end of the sense strand contains one or more mismatches. In one embodiment, two mismatches are incorporated at the 3′ end of the sense strand. In some embodiments, base mismatches, or destabilization of segments at the 3′ end of the sense strand of the RNAi oligonucleotide improves or increases the potency of the oligonucleotide.

[0260] In some embodiments, the RNAi oligonucleotide comprises a sense strand and an antisense strand comprising nucleotide sequences selected from:
[0261] a) SEQ ID NOs: 769 and 804, respectively;
[0262] b) SEQ ID NOs: 770 and 805, respectively;
[0263] c) SEQ ID NOs: 771 and 806, respectively;
[0264] d) SEQ ID NOs: 772 and 807, respectively;
[0265] e) SEQ ID NOs: 773 and 808, respectively;
[0266] f) SEQ ID NOs: 774 and 809, respectively;
[0267] g) SEQ ID NOs: 775 and 810, respectively;
[0268] h) SEQ ID NOs: 776 and 811, respectively;
[0269] i) SEQ ID NOs: 777 and 812, respectively;
[0270] j) SEQ ID NOs: 778 and 813, respectively;
[0271] k) SEQ ID NOs: 779 and 814, respectively;
[0272] l) SEQ ID NOs: 780 and 815, respectively;
[0273] m) SEQ ID NOs: 781 and 816, respectively;
[0274] n) SEQ ID NOs: 782 and 817, respectively;
[0275] o) SEQ ID NOs: 783 and 818, respectively;
[0276] p) SEQ ID NOs: 784 and 819, respectively;
[0277] q) SEQ ID NOs: 785 and 820, respectively;
[0278] r) SEQ ID NOs: 786 and 821, respectively;
[0279] s) SEQ ID NOs: 787 and 822, respectively;
[0280] t) SEQ ID NOs: 788 and 823, respectively;
[0281] u) SEQ ID NOs: 789 and 824, respectively;
[0282] v) SEQ ID NOs: 790 and 825, respectively;
[0283] w) SEQ ID NOs: 791 and 826, respectively;
[0284] x) SEQ ID NOs: 792 and 827, respectively;
[0285] y) SEQ ID NOs: 793 and 828, respectively;
[0286] z) SEQ ID NOs: 794 and 829, respectively;
[0287] aa) SEQ ID NOs: 795 and 830, respectively;
[0288] bb) SEQ ID NOs: 796 and 831, respectively;
[0289] cc) SEQ ID NOs: 797 and 832, respectively;
[0290] dd) SEQ ID NOs: 798 and 833, respectively;
[0291] ee) SEQ ID NOs: 799 and 834, respectively;
[0292] ff) SEQ ID NOs: 800 and 835, respectively;
[0293] gg) SEQ ID NOs: 801 and 836, respectively;
[0294] hh) SEQ ID NOs: 802 and 837, respectively;
[0295] ii) SEQ ID NOs: 803 and 838, respectively; and
[0296] jj) SEQ ID NOs: 1681 and 815, respectively, wherein there is one or more (e.g., 1, 2, 3, 4, or 5) mismatch(s) between the sense and antisense strands.

[0297] In some embodiments, the RNAi oligonucleotide comprises a sense strand and an antisense strand comprising nucleotide sequences selected from:
[0298] a) SEQ ID NOs: 771 and 806, respectively;
[0299] b) SEQ ID NOs: 776 and 811, respectively;
[0300] c) SEQ ID NOs: 780 and 815, respectively;
[0301] d) SEQ ID NOs: 781 and 816, respectively;
[0302] e) SEQ ID NOs: 782 and 817, respectively;
[0303] f) SEQ ID NOs: 790 and 825, respectively;
[0304] g) SEQ ID NOs: 795 and 830, respectively;
[0305] h) SEQ ID NOs: 798 and 833, respectively;
[0306] i) SEQ ID NOs: 799 and 834, respectively;
[0307] j) SEQ ID NOs: 803 and 838, respectively; and
[0308] k) SEQ ID NOs: 1681 and 815, respectively, wherein there is one or more (e.g., 1, 2, 3, 4, or 5) mismatch(s) between the sense and antisense strands.

[0309] In some embodiments, the RNAi oligonucleotide comprises a sense strand and an antisense strand comprising sequence selected from:
[0310] a) SEQ ID NOs: 771 and 806, respectively;
[0311] b) SEQ ID NOs: 780 and 815, respectively;
[0312] c) SEQ ID NOs: 781 and 816, respectively;
[0313] d) SEQ ID NOs: 798 and 833, respectively;
[0314] e) SEQ ID NOs: 799 and 834, respectively;
[0315] f) SEQ ID NOs: 803 and 838, respectively; and
[0316] g) SEQ ID NOs: 1681 and 815, respectively, wherein there is one or more (e.g., 1, 2, 3, 4, or 5) mismatch(s) between the sense and antisense strands.

[0317] Antisense Strands

[0318] In some embodiments, an antisense strand of an oligonucleotide herein (e.g., a RNAi oligonucleotide) is referred to as a “guide strand.” The antisense strand engages with RISC and binds to an Argonaute protein such as Ago2, or engages with or binds to one or more similar factors, and directs silencing of a target gene. In some embodiments, a sense strand complementary to a guide strand is referred to as a “passenger strand.”

[0319] In some embodiments, an oligonucleotide comprises an antisense strand of up to about 50 nucleotides in length (e.g., up to 50, up to 40, up to 35, up to 30, up to 27, up to 25, up to 21, up to 19, up to 17, up to 15, or up to 12 nucleotides in length). In some embodiments, the oligonucleotide comprises an antisense strand of at least about 12 nucleotides in length (e.g., at least 12, at least 15, at least 19, at least 21, at least 22, at least 25, at least 27, at least 30, at least 35, or at least 38 nucleotides in length). In some embodiments, the oligonucleotide comprises an antisense strand in a range of about 12 to about 40 (e.g., 12 to 40, 12 to 36, 12 to 32, 12 to 28, 15 to 40, 15 to 36, 15 to 32, 15 to 30, 15 to 28, 17 to 22, 17 to 25, 19 to 27, 19 to 30, 20 to 40, 22 to 40, 25 to 40, or 32 to 40) nucleotides in length. In some embodiments, the oligonucleotide comprises an antisense of about 15 to about 30 nucleotides in length. In some embodiments, an antisense strand of any one of the oligonucleotides disclosed herein is 12, 13, 14, 15, 16, 17, 18, 19, 20, 21, 22, 23, 24, 25, 26, 27, 28, 29, 30, 31, 32, 33, 34, 35, 36, 37, 38, 39, or 40 nucleotides in length. In some embodiments, the oligonucleotide comprises an antisense strand of 22 nucleotides in length.

[0320] In some embodiments, an oligonucleotide for targeting MAPT comprises an antisense strand comprising or consisting of a sequence as set forth in any one of SEQ ID NOs: 1296-1679. In some embodiments, the oligonucleotide comprises an antisense strand comprising at least about 12 (e.g., at least 12, at least 13, at least 14, at least 15, at least 16, at least 17, at least 18, at least 19, at least 20, at least 21, at least 22, or at least 23) contiguous nucleotides of a sequence as set forth in any one of SEQ ID NOs: 1296-1679. In some embodiments, the oligonucleotide for targeting MAPT comprises an antisense strand comprising or consisting of a sequence as set forth in any one of SEQ ID NOs: 385-768. In some embodiments, the oligonucleotide comprises an antisense strand comprising at least about 12 (e.g., at least 12, at least 13, at least 14, at least 15, at least 16, at least 17, at least 18, at least 19, at least 20, at least 21, at least 22, or at least 23) contiguous nucleotides of a sequence as set forth in any one of SEQ ID NOs: 385-768. In some embodiments, the oligonucleotide for targeting MAPT comprises an antisense strand comprising or consisting of a sequence as set forth in any one of SEQ ID NOs: 804-838. In some embodiments, the oligonucleotide comprises an antisense strand comprising at least about 12 (e.g., at least 12, at least 13, at least 14, at least 15, at least 16, at least 17, at least 18, at least 19, at least 20, at least 21, at least 22, or at least 23) contiguous nucleotides of a sequence as set forth in any one of SEQ ID NOs: 804-838. In some embodiments, the oligonucleotide for targeting MAPT comprises an antisense strand comprising or consisting of a sequence as set forth in any one of SEQ ID NOs: 1509, 1511, 1514, 1403, 1415, 1428, 1448, 1449, 1451, 1467, 1299, 1479, 1480, 1486, 1494, 1307, 1309, 1409, 1423, 1433, 1445, 1454, 1456, 1459, 1465, 1492, 1495, 1498, 1503, 1504, 1505, 1506, 1507, 1508, and 1308. In some embodiments, the oligonucleotide comprises an antisense strand comprising at least about 12 (e.g., at least 12, at least 13, at least 14, at least 15, at least 16, at least 17, at least 18, at least 19, at least 20, at least 21, at least 22, or at least 23) contiguous nucleotides of a sequence as set forth in any one of SEQ ID NOs: 1509, 1511, 1514, 1403, 1415, 1428, 1448, 1449, 1451, 1467, 1299, 1479, 1480, 1486, 1494, 1307, 1309, 1409, 1423, 1433, 1445, 1454, 1456, 1459, 1465, 1492, 1495, 1498, 1503, 1504, 1505, 1506, 1507, 1508, and 1308. In some embodiments, the oligonucleotide for targeting MAPT comprises an antisense strand comprising or consisting of a sequence as set forth in any one of SEQ ID NOs: 806, 811, 815, 816, 817, 825, 830, 833, 834, and 838. In some embodiments, the oligonucleotide comprises an antisense strand comprising at least about 12 (e.g., at least 12, at least 13, at least 14, at least 15, at least 16, at least 17, at least 18, at least 19, at least 20, at least 21, at least 22, or at least 23) contiguous nucleotides of a sequence as set forth in any one of SEQ ID NOs: 806, 811, 815, 816, 817, 825, 830, 833, 834, and 838. In some embodiments, the oligonucleotide for targeting MAPT comprises an antisense strand comprising or consisting of a sequence as set forth in any one of SEQ ID NOs: 806, 815, 816, 833, 834, and 838. In some embodiments, the oligonucleotide comprises an antisense strand comprising at least about 12 (e.g., at least 12, at least 13, at least 14, at least 15, at least 16, at least 17, at least 18, at least 19, at least 20, at least 21, at least 22, or at least 23) contiguous nucleotides of a sequence as set forth in any one of SEQ ID NOs: 806, 815, 816, 833, 834, and 838.

### Sense Strands

[0321] In some embodiments, an oligonucleotide (e.g., a RNAi oligonucleotide) for targeting MAPT mRNA comprises a sense strand comprising or consisting of a sequence as set forth in in any one of SEQ ID NOs: 912-1295. In some embodiments, the oligonucleotide has a sense strand that comprise at least about 12 (e.g., at least 13, at least 14, at least 15, at least 16, at least 17, at least 18, at least 19, at least 20, at least 21, at least 22, or at least 23) contiguous nucleotides of a sequence as set forth in in any one of SEQ ID NOs: 912-1295. In some embodiments, the oligonucleotide comprises a sense strand sequence a set forth in any one of SEQ ID NOs: 1-384. In some embodiments, the oligonucleotide has a sense strand that comprise at least about 12 (e.g., at least 13, at least 14, at least 15, at least 16, at least 17, at least 18, at least 19, at least 20, at least 21, at least 22, or at least 23) contiguous nucleotides of a sequence as set forth in in any one of SEQ ID NOs: 1-384. In some embodiments, the oligonucleotide comprises a sense strand sequence as set forth in any one of SEQ ID NOs: 769-803. In some embodiments, the oligonucleotide comprises a sense strand sequence as set forth in any one of SEQ ID NOs: 769-803 and 1681. In some embodiments, the oligonucleotide comprises the sense strand sequence as set forth in SEQ ID NO: 1681. In some embodiments, the oligonucleotide has a sense strand comprised of least about 12 (e.g., at least 13, at least 14, at least 15, at least 16, at least 17, at least 18, at least 19, at least 20, at least 21, at least 22, or at least 23) contiguous nucleotides of a sequence as set forth in any one of SEQ ID NOs: 769-803. In some embodiments, the oligonucleotide comprises a sense strand sequence as set forth in any one of SEQ ID NOs: 1125, 1127, 1130, 1019, 1031, 1044, 1064, 1065, 1067, 1083, 915, 1095, 1096, 1102, 1110, 923, 925, 1025, 1039, 1049, 1061, 1070, 1072, 1075, 1081, 1108, 1111, 1114, 1119, 1120, 1121, 1122, 1123, 1124, and 924. In some embodiments, the oligonucleotide has a sense strand comprised of least about 12 (e.g., at least 13, at least 14, at least 15, at least 16, at least 17, at least 18, at least 19, at least 20, at least 21, at least 22, or at least 23) contiguous nucleotides of a sequence as set forth in any one of SEQ ID NOs: 1125, 1127, 1130, 1019, 1031, 1044, 1064, 1065, 1067, 1083, 915, 1095, 1096, 1102, 1110, 923, 925, 1025, 1039, 1049, 1061, 1070, 1072, 1075, 1081, 1108, 1111, 1114, 1119, 1120, 1121, 1122, 1123, 1124, and 924. In some embodiments, the oligonucleotide comprises a sense strand sequence as set forth in any one of SEQ ID NOs: 771, 776, 780, 781, 782, 790, 795, 798, 799, and 803. In some embodiments, the oligonucleotide has a sense strand that comprise at least about 12 (e.g., at least 13, at least 14, at least 15, at least 16, at least 17, at least 18, at least 19, at least 20, at least 21, at least 22, or at least 23) contiguous nucleotides of a sequence as set forth in any one of SEQ ID NOs: 771, 776, 780, 781, 782, 790, 795, 798, 799, and 803. In some embodiments, the oligonucleotide comprises a sense strand sequence as set forth in any one of SEQ ID NOs: 771, 780, 781, 798, 799, and 803. In some embodiments, the oligonucleotide has a sense strand that comprise at least about 12 (e.g., at least 13, at least 14, at least 15, at least 16, at least 17, at least 18, at least 19, at least 20, at least 21, at least 22, or at least 23) contiguous nucleotides of a sequence as set forth in any one of SEQ ID NOs: 771, 780, 781, 798, 799, and 803.

[0322] In some embodiments, the oligonucleotide comprises a sense strand sequence as set forth in any one of SEQ ID NOs: 771, 776, 780, 781, 782, 790, 795, 798, 799, 803, and 1681. In some embodiments, the oligonucleotide has a sense strand that comprises at least about 12 (e.g., at least 13, at least 14, at least 15, at least 16, at least 17, at least 18, at least 19, at least 20, at least 21, at least 22, or at least 23) contiguous nucleotides of a sequence as set forth in any one of SEQ ID NOs: 771, 776, 780, 781, 782, 790, 795, 798, 799, 803, and 1681. In some embodiments, the oligonucleotide comprises a sense strand sequence as set forth in any one of SEQ ID NOs: 771, 780, 781, 798, 799, 803, and 1681. In some embodiments, the oligonucleotide has a sense strand that comprise at least about 12 (e.g., at least 13, at least 14, at least 15, at least 16, at least 17, at least 18, at least 19, at least 20, at least 21, at least 22, or at least 23) contiguous nucleotides of a sequence as set forth in any one of SEQ ID NOs: 771, 780, 781, 798, 799, 803, and 1681.

[0323] In some embodiments, the oligonucleotide comprises a sense strand of up to about 50 nucleotides in length (e.g., up to 50, up to 40, up to 36, up to 30, up to 27, up to 25, up to 21, up to 19, up to 17, or up to 12 nucleotides in length). In some embodiments, the oligonucleotide may have a sense strand of at least about 12 nucleotides in length (e.g., at least 12, at least 15, at least 19, at least 21, at least 25, at least 27, at least 30, at least 36, or at least 38 nucleotides in length). In some embodiments, the oligonucleotide may have a sense strand in a range of about 12 to about 50 (e.g., 12 to 50, 12 to 40, 12 to 36, 12 to 32, 12 to 28, 15 to 40, 15 to 36, 15 to 32, 15 to 28, 17 to 21, 17 to 25, 19 to 27, 19 to 30, 20 to 40, 22 to 40, 25 to 40, or 32 to 40) nucleotides in length. In some embodiments, the oligonucleotide comprises a sense strand about 15 to about 50 nucleotides in length. In some embodiments, the oligonucleotide comprises a sense strand 18 to 36 nucleotides in length. In some embodiments, the oligonucleotide may have a sense strand of 12, 13, 14, 15, 16, 17, 18, 19, 20, 21, 22, 23, 24, 25, 26, 27, 28, 29, 30, 31, 32, 33, 34, 35, 36, 37, 38, 39, 40, 41, 42, 43, 44, 45, 46, 47, 48, 49, or 50 nucleotides in length. In some embodiments, the oligonucleotide comprises a sense strand of 36 nucleotides in length.

[0324] In some embodiments, the oligonucleotide comprises a sense strand comprising a stem-loop structure at the 3′ end of the sense strand. In some embodiments, the stem-loop is formed by intrastrand base pairing. In some embodiments, the sense strand comprises a stem-loop structure at its 5′ end. In some embodiments, the stem of the stem-loop comprises a duplex of 2, 3, 4, 5, 6, 7, 8, 9, 10, 11, 12, 13, or 14 nucleotides in length. In some embodiments, the stem of the stem-loop comprises a duplex of 2 nucleotides in length. In some embodiments, the stem of the stem-loop comprises a duplex of 3 nucleotides in length. In some embodiments, the stem of the stem-loop comprises a duplex of 4 nucleotides in length. In some embodiments, the stem of the stem-loop comprises a duplex of 5 nucleotides in length. In some embodiments, the stem of the stem-loop comprises a duplex of 6 nucleotides in length. In some embodiments, the stem of the stem-loop comprises a duplex of 7 nucleotides in length. In some embodiments, the stem of the stem-loop comprises a duplex of 8 nucleotides in length. In some embodiments, the stem of the stem-loop comprises a duplex of 9 nucleotides in length. In some embodiments, the stem of the stem-loop comprises a duplex of 10 nucleotides in length. In some embodiments, the stem of the stem-loop comprises a duplex of 11 nucleotides in length. In some embodiments, the stem of the stem-loop comprises a duplex of 12 nucleotides in length. In some embodiments, the stem of the stem-loop comprises a duplex of 13 nucleotides in length. In some embodiments, the stem of the stem-loop comprises a duplex of 14 nucleotides in length.

[0325] In some embodiments, a stem-loop provides oligonucleotide protection against degradation (e.g., enzymatic degradation), facilitates or improves targeting and/or delivery to a target cell, tissue, or organ (e.g., the liver or brain), or both. For example, in some embodiments, the loop of a stem-loop provides nucleotides comprising one or more modifications that facilitate, improve, or increase targeting to a target mRNA (e.g., a MAPT mRNA), inhibition of target gene expression (e.g., MAPT gene expression), and/or delivery to a target cell, tissue, or organ (e.g., the CNS), or a combination thereof. In some embodiments, the stem-loop itself or modification(s) to the stem-loop do not substantially affect the inherent gene expression inhibition activity of the oligonucleotide, but facilitates, improves, or increases stability (e.g., provides protection against degradation) and/or delivery of the oligonucleotide to a target cell, tissue, or organ (e.g., the CNS). In certain embodiments, the oligonucleotide comprises a sense strand comprising (e.g., at its 3′ end) a stem-loop set forth as: S1-L-S2, in which S1 is complementary to S2, and in which loop (L) forms a ss loop between S1 and S2 of up to about 10 nucleotides in length (e.g., 3, 4, 5, 6, 7, 8, 9, or 10 nucleotides in length). In some embodiments, the L is 3 nucleotides in length. In some embodiments, the L is 4 nucleotides in length. In some embodiments, the L is 5 nucleotides in length. In some embodiments, the L is 6 nucleotides in length. In some embodiments, the L is 7 nucleotides in length. In some embodiments, the L is 8 nucleotides in length. In some embodiments, the L is 9 nucleotides in length. In some embodiments, the L is 10 nucleotides in length.

[0326] In some embodiments, the oligonucleotide comprises a targeting sequence or a region of complementary that is complementary to a contiguous sequence of nucleotides of any one of SEQ ID NOs: 912-1295, and the oligonucleotide comprises a sense strand comprising (e.g., at its 3′ end) a stem-loop set forth as: S1-L-S2, in which S1 is complementary to S2, and in which L forms a ss loop between S1 and S2 of up to about 10 nucleotides in length (e.g., 3, 4, 5, 6, 7, 8, 9, or 10 nucleotides in length). In some embodiments, the oligonucleotide comprises a targeting sequence or a region of complementary that is complementary to a contiguous sequence of nucleotides of any one of SEQ ID NOs: 912-1295, and the oligonucleotide comprises a sense strand comprising (e.g., at its 3′ end) a stem-loop set forth as: S1-L-S2, in which S1 is complementary to S2, and in which L forms a ss loop between S1 and S2 of 4 nucleotides in length (i.e., a tetraL).

[0327] In some embodiments, the tetraL comprises the sequence 5′-GAAA-3′. In some embodiments, the stem-loop comprises the sequence 5′-GCAGCCGAAAGGCUGC-3′ (SEQ ID NO: 1680).

[0328] In some embodiments, the L of a stem-loop having the structure S1-L-S2 as described above is a triL. In some embodiments, the oligonucleotide comprises a targeting sequence or a region of complementary that is complementary to a contiguous sequence of nucleotides of any one of SEQ ID NOs: 912-1295 and a triL. In some embodiments, the triL comprises ribonucleotides, deoxyribonucleotides, modified nucleotides, delivery ligands, and combinations thereof.

[0329] In some embodiments, the L of a stem-loop having the structure S1-L-S2 as described above is a tetraL as described in U.S. Pat. No. 10,131,912, incorporated herein by reference (e.g., within a nicked tetraL structure). In some embodiments, the oligonucleotide comprises a targeting sequence or a region of complementary that is complementary to a contiguous sequence of nucleotides of any one of SEQ ID NOs: 912-1295 and a tetraL. In some embodiments, the tetraL comprises ribonucleotides, deoxyribonucleotides, modified nucleotides, delivery ligands, and combinations thereof.

[0330] Duplex Length

[0331] In some embodiments, a duplex is formed between a sense and antisense strand and is at least about 12 (e.g., at least 12, at least 13, at least 14, at least 15, at least 16, at least 17, at least 18, at least 19, at least 20, or at least 21) nucleotides in length. In some embodiments, the duplex formed between the sense and antisense strands is in the range of about 12 to about 30 nucleotides in length (e.g., 12 to 30, 12 to 27, 12 to 22, 15 to 25, 18 to 30, 18 to 22, 18 to 25, 18 to 27, 18 to 30, 19 to 30, or 21 to 30 nucleotides in length). In some embodiments, the duplex formed between the sense and antisense strands is 12, 13, 14, 15, 16, 17, 18, 19, 29, 21, 22, 23, 24, 25, 26, 27, 28, 29, or 30 nucleotides in length. In some embodiments, the duplex formed between the sense and antisense strands is 12 nucleotides in length. In some embodiments, the duplex formed between the sense and antisense strands is 13 nucleotides in length. In some embodiments, the duplex formed between the sense and antisense strands is 14 nucleotides in length. In some embodiments, the duplex formed between the sense and antisense strands is 15 nucleotides in length. In some embodiments, the duplex formed between the sense and antisense strands is 16 nucleotides in length. In some embodiments, the duplex formed between the sense and antisense strands is 17 nucleotides in length. In some embodiments, the duplex formed between the sense and antisense strands is 18 nucleotides in length. In some embodiments, the duplex formed between the sense and antisense strands is 19 nucleotides in length. In some embodiments, the duplex formed between the sense and antisense strands is 20 nucleotides in length. In some embodiments, the duplex formed between the sense and antisense strands is 21 nucleotides in length. In some embodiments, the duplex formed between the sense and antisense strands is 22 nucleotides in length. In some embodiments, the duplex formed between the sense and antisense strands is 23 nucleotides in length. In some embodiments, the duplex formed between the sense and antisense strands is 24 nucleotides in length. In some embodiments, the duplex formed between the sense and antisense strands is 25 nucleotides in length. In some embodiments, the duplex formed between the sense and antisense strands is 26 nucleotides in length. In some embodiments, the duplex formed between the sense and antisense strands is 27 nucleotides in length. In some embodiments, the duplex formed between the sense and antisense strands is 28 nucleotides in length. In some embodiments, the duplex formed between the sense and antisense strands is 29 nucleotides in length. In some embodiments, the duplex formed between the sense and antisense strands is 30 nucleotides in length. In some embodiments, the duplex formed between the sense and antisense strands does not span the entire length of the sense strand and/or antisense strand. In some embodiments, the duplex between the sense and antisense strand spans the entire length of either the sense or antisense strands. In some embodiments, the duplex between the sense and antisense strands spans the entire length of both the sense strand and the antisense strand.

[0332] In some embodiments, the duplex between the sense and antisense strands spans the entire length of both the sense strand and the antisense strand. In some embodiments, the sense and antisense strands of the oligonucleotide comprise nucleotides sequences selected from the group consisting of:
[0333] a) SEQ ID NO: 769 and 804, respectively;
[0334] b) SEQ ID NO: 770 and 805, respectively;
[0335] c) SEQ ID NO: 771 and 806, respectively;
[0336] d) SEQ ID NO: 772 and 807, respectively;
[0337] e) SEQ ID NO: 773 and 808, respectively;
[0338] f) SEQ ID NO: 774 and 809, respectively;
[0339] g) SEQ ID NO: 775 and 810, respectively;
[0340] h) SEQ ID NO: 776 and 811, respectively;
[0341] i) SEQ ID NO: 777 and 812, respectively;
[0342] j) SEQ ID NO: 778 and 813, respectively;
[0343] k) SEQ ID NO: 779 and 814, respectively;
[0344] l) SEQ ID NO: 780 and 815, respectively;
[0345] m) SEQ ID NO: 781 and 816, respectively;
[0346] n) SEQ ID NO: 782 and 817, respectively;
[0347] o) SEQ ID NO: 783 and 818, respectively;
[0348] p) SEQ ID NO: 784 and 819, respectively;
[0349] q) SEQ ID NO: 785 and 820, respectively;
[0350] r) SEQ ID NO: 786 and 821, respectively;
[0351] s) SEQ ID NO: 787 and 822, respectively;
[0352] t) SEQ ID NO: 788 and 823, respectively;
[0353] u) SEQ ID NO: 789 and 824, respectively;
[0354] v) SEQ ID NO: 790 and 825, respectively;
[0355] w) SEQ ID NO: 791 and 826, respectively;
[0356] x) SEQ ID NO: 792 and 827, respectively;
[0357] y) SEQ ID NO: 793 and 828, respectively;
[0358] z) SEQ ID NO: 794 and 829, respectively;
[0359] aa) SEQ ID NO: 795 and 830, respectively;
[0360] bb) SEQ ID NO: 796 and 831, respectively;
[0361] cc) SEQ ID NO: 797 and 832, respectively;
[0362] dd) SEQ ID NO: 798 and 833, respectively;
[0363] ee) SEQ ID NO: 799 and 834, respectively;
[0364] ff) SEQ ID NO: 800 and 835, respectively;
[0365] gg) SEQ ID NO: 801 and 836, respectively;
[0366] hh) SEQ ID NO: 802 and 837, respectively;
[0367] ii) SEQ ID NO: 803 and 838, respectively; and
[0368] jj) SEQ ID NOs: 1681 and 815, respectively, wherein the duplex formed between the sense and antisense strand is in the range of about 12 to about 30 nucleotides in length (e.g., 12 to 30, 12 to 27, 12 to 22, 15 to 25, 18 to 30, 18 to 22, 18 to 25, 18 to 27, 18 to 30, 19 to 30, or 21 to 30 nucleotides in length).

[0369] In some embodiments, the duplex between the sense and antisense strands spans the entire length of both the sense strand and the antisense strand. In some embodiments, the sense and antisense strands of the oligonucleotide comprise nucleotides sequences selected from the group consisting of:
[0370] a) SEQ ID NO: 771 and 806, respectively;
[0371] b) SEQ ID NO: 776 and 811, respectively;
[0372] c) SEQ ID NO: 780 and 815, respectively;
[0373] d) SEQ ID NO: 781 and 816, respectively;
[0374] e) SEQ ID NO: 782 and 817, respectively;
[0375] f) SEQ ID NO: 790 and 825, respectively;
[0376] g) SEQ ID NO: 795 and 830, respectively;
[0377] h) SEQ ID NO: 798 and 833, respectively;
[0378] i) SEQ ID NO: 799 and 834, respectively;
[0379] j) SEQ ID NO: 803 and 838, respectively; and
[0380] k) SEQ ID NOs: 1681 and 815, respectively, wherein the duplex formed between the sense and antisense strand is in the range of about 12 to about 30 nucleotides in length (e.g., 12 to 30, 12 to 27, 12 to 22, 15 to 25, 18 to 30, 18 to 22, 18 to 25, 18 to 27, 18 to 30, 19 to 30, or 21 to 30 nucleotides in length).

[0381] In some embodiments, the duplex between the sense and antisense strands spans the entire length of both the sense strand and the antisense strand. In some embodiments, the sense and antisense strands of the oligonucleotide comprise nucleotides sequences selected from the group consisting of:
[0382] a) SEQ ID NO: 771 and 806, respectively;
[0383] b) SEQ ID NO: 780 and 815, respectively;
[0384] c) SEQ ID NO: 781 and 816, respectively;
[0385] d) SEQ ID NO: 798 and 833, respectively;
[0386] e) SEQ ID NO: 799 and 834, respectively;
[0387] f) SEQ ID NO: 803 and 838, respectively; and
[0388] g) SEQ ID NOs: 1681 and 815, respectively, wherein the duplex formed between the sense and antisense strand is in the range of about 12 to about 30 nucleotides in length (e.g., 12 to 30, 12 to 27, 12 to 22, 15 to 25, 18 to 30, 18 to 22, 18 to 25, 18 to 27, 18 to 30, 19 to 30, or 21 to 30 nucleotides in length).

[0389] Oligonucleotide Termini

[0390] In some embodiments, an oligonucleotide herein (e.g., a RNAi oligonucleotide) comprises a sense strand and an antisense strand, wherein termini of either or both strands comprise a blunt end. In some embodiments, the oligonucleotide comprises sense and antisense strands that are separate strands that form an asymmetric duplex region having an overhang at the 3′ terminus of the antisense strand. In some embodiments, the oligonucleotide comprises a sense strand and an antisense strand, wherein termini of either or both strands comprise an overhang comprising one or more nucleotides. In some embodiments, the one or more nucleotides comprising the overhang are unpaired nucleotides. In some embodiments, the oligonucleotide comprises a sense strand and an antisense strand, wherein a 3′ terminus of the sense strand and a 5′ terminus of the antisense strand comprise a blunt end. In some embodiments, the oligonucleotide comprises a sense strand and an antisense strand, wherein a 5′ terminus of the sense strand and a 3′ terminus of the antisense strand comprise a blunt end.

[0391] In some embodiments, the oligonucleotide comprises a sense strand and an antisense strand, wherein a 3′ terminus of either or both strands comprises a 3′ overhang comprising one or more nucleotides. In some embodiments, the oligonucleotide comprises a sense strand and an antisense strand, wherein the sense strand comprises a 3′ overhang comprising one or more nucleotides. In some embodiments, the oligonucleotide comprises a sense strand and an antisense strand, wherein the antisense strand comprises a 3′ overhang comprising one or more nucleotides. In some embodiments, the oligonucleotide comprises a sense strand and an antisense strand, wherein both the sense strand and the antisense strand comprise a 3′ overhang comprising one or more nucleotides.

[0392] In some embodiments, the 3′ overhang is about 1 to about 20 nucleotides in length (e.g., about 1, 2, 3, 4, 5, 6, 7, 8, 9, 10, 11, 12, 13, 14, 15, 16, 17, 18, 19, or 20 nucleotides in length). In some embodiments, the 3′ overhang is 1 to 19, 1 to 18, 1 to 17, 1 to 16, 1 to 15, 1 to 14, 1 to 13, 1 to 12, 1 to 11, 1 to 10, 1 to 9, 1 to 8, 1 to 7, 1 to 6, 1 to 5, 1 to 4, 1 to 3, or 1 to 2 nucleotides in length). In some embodiments, the 3′ overhang is 1 nucleotide in length. In some embodiments, the 3′ overhang is 2 nucleotides in length. In some embodiments, the 3′ overhang is 3 nucleotides in length. In some embodiments, the 3′ overhang is 4 nucleotides in length. In some embodiments, the 3′ overhang is 5 nucleotides in length. In some embodiments, the 3′ overhang is 6 nucleotides in length. In some embodiments, the 3′ overhang is 7 nucleotides in length. In some embodiments, the 3′-overhang is 8 nucleotides in length. In some embodiments, the 3′ overhang is 9 nucleotides in length. In some embodiments, the 3′ overhang is 10 nucleotides in length. In some embodiments, the 3′ overhang is 11 nucleotides in length. In some embodiments, the 3′ overhang is 12 nucleotides in length. In some embodiments, the 3′ overhang is 13 nucleotides in length. In some embodiments, the 3′ overhang is 14 nucleotides in length. In some embodiments, the 3′ overhang is 15 nucleotides in length. In some embodiments, the 3′ overhang is 16 nucleotides in length. In some embodiments, the 3′ overhang is 17 nucleotides in length. In some embodiments, the 3′ overhang is 18 nucleotides in length. In some embodiments, the 3′ overhang is 19 nucleotides in length. In some embodiments, the 3′ overhang is 20 nucleotides in length.

[0393] In some embodiments, the oligonucleotide comprises a sense strand and an antisense strand, wherein the antisense strand comprises a 3′ overhang, wherein the sense and antisense strands of the oligonucleotide comprise nucleotides sequences selected from the group consisting of:
[0394] a) SEQ ID NO: 769 and 804, respectively;
[0395] b) SEQ ID NO: 770 and 805, respectively;
[0396] c) SEQ ID NO: 771 and 806, respectively;
[0397] d) SEQ ID NO: 772 and 807, respectively;
[0398] e) SEQ ID NO: 773 and 808, respectively;
[0399] f) SEQ ID NO: 774 and 809, respectively;
[0400] g) SEQ ID NO: 775 and 810, respectively;
[0401] h) SEQ ID NO: 776 and 811, respectively;
[0402] i) SEQ ID NO: 777 and 812, respectively;
[0403] j) SEQ ID NO: 778 and 813, respectively;
[0404] k) SEQ ID NO: 779 and 814, respectively;
[0405] l) SEQ ID NO: 780 and 815, respectively;
[0406] m) SEQ ID NO: 781 and 816, respectively;
[0407] n) SEQ ID NO: 782 and 817, respectively;
[0408] o) SEQ ID NO: 783 and 818, respectively;
[0409] p) SEQ ID NO: 784 and 819, respectively;
[0410] q) SEQ ID NO: 785 and 820, respectively;
[0411] r) SEQ ID NO: 786 and 821, respectively;
[0412] s) SEQ ID NO: 787 and 822, respectively;
[0413] t) SEQ ID NO: 788 and 823, respectively;
[0414] u) SEQ ID NO: 789 and 824, respectively;
[0415] v) SEQ ID NO: 790 and 825, respectively;
[0416] w) SEQ ID NO: 791 and 826, respectively;
[0417] x) SEQ ID NO: 792 and 827, respectively;
[0418] y) SEQ ID NO: 793 and 828, respectively;
[0419] z) SEQ ID NO: 794 and 829, respectively;
[0420] aa) SEQ ID NO: 795 and 830, respectively;
[0421] bb) SEQ ID NO: 796 and 831, respectively;
[0422] cc) SEQ ID NO: 797 and 832, respectively;
[0423] dd) SEQ ID NO: 798 and 833, respectively;
[0424] ee) SEQ ID NO: 799 and 834, respectively;
[0425] ff) SEQ ID NO: 800 and 835, respectively;
[0426] gg) SEQ ID NO: 801 and 836, respectively;
[0427] hh) SEQ ID NO: 802 and 837, respectively;
[0428] ii) SEQ ID NO: 803 and 838, respectively; and
[0429] jj) SEQ ID NOs: 1681 and 815, respectively, wherein the antisense strand comprises the 3′ overhang about 1 to about 20 nucleotides in length (e.g., about 1, 2, 3, 4, 5, 6, 7, 8, 9, 10, 11, 12, 13, 14, 15, 16, 17, 18, 19, or 20 nucleotides in length), optionally wherein the 3′ overhang is 2 nucleotides in length.

[0430] In some embodiments, the oligonucleotide comprises a sense strand and an antisense strand, wherein the antisense strand comprises the 3′ overhang, wherein the sense and antisense strands of the oligonucleotide comprise nucleotides sequences selected from the group consisting of:
[0431] a) SEQ ID NO: 771 and 806, respectively;
[0432] b) SEQ ID NO: 776 and 811, respectively;
[0433] c) SEQ ID NO: 780 and 815, respectively;
[0434] d) SEQ ID NO: 781 and 816, respectively;
[0435] e) SEQ ID NO: 782 and 817, respectively;
[0436] f) SEQ ID NO: 790 and 825, respectively;
[0437] g) SEQ ID NO: 795 and 830, respectively;
[0438] h) SEQ ID NO: 798 and 833, respectively;
[0439] i) SEQ ID NO: 799 and 834, respectively;
[0440] j) SEQ ID NO: 803 and 838, respectively; and
[0441] k) SEQ ID NOs: 1681 and 815, respectively, wherein the antisense strand comprises the 3′ overhang about 1 to about 20 nucleotides in length (e.g., about 1, 2, 3, 4, 5, 6, 7, 8, 9, 10, 11, 12, 13, 14, 15, 16, 17, 18, 19, or 20 nucleotides in length), optionally wherein the 3′ overhang is 2 nucleotides in length.

[0442] In some embodiments, the oligonucleotide comprises a sense strand and an antisense strand, wherein the antisense strand comprises the 3′ overhang, wherein the sense and antisense strands of the oligonucleotide comprise nucleotides sequences selected from the group consisting of:
[0443] a) SEQ ID NO: 771 and 806, respectively;
[0444] b) SEQ ID NO: 780 and 815, respectively;
[0445] c) SEQ ID NO: 781 and 816, respectively;
[0446] d) SEQ ID NO: 798 and 833, respectively;
[0447] e) SEQ ID NO: 799 and 834, respectively;
[0448] f) SEQ ID NO: 803 and 838, respectively; and
[0449] g) SEQ ID NOs: 1681 and 815, respectively, wherein the antisense strand comprises a 3′ overhang about 1 to about 20 nucleotides in length (e.g., about 1, 2, 3, 4, 5, 6, 7, 8, 9, 10, 11, 12, 13, 14, 15, 16, 17, 18, 19, or 20 nucleotides in length), optionally wherein the 3′ overhang is 2 nucleotides in length.

[0450] In some embodiments, the oligonucleotide comprises a sense strand and an antisense strand, wherein the sense strand comprises a 5′ overhang comprising one or more nucleotides.

[0451] In some embodiments, the oligonucleotide comprises a sense strand and an antisense strand, wherein the sense and antisense strands of the oligonucleotide comprise nucleotides sequences selected from the group consisting of:
[0452] a) SEQ ID NOs: 769 and 804, respectively;
[0453] b) SEQ ID NOs: 770 and 805, respectively;
[0454] c) SEQ ID NOs: 771 and 806, respectively;
[0455] d) SEQ ID NOs: 772 and 807, respectively;
[0456] e) SEQ ID NOs: 773 and 808, respectively;
[0457] f) SEQ ID NOs: 774 and 809, respectively;
[0458] g) SEQ ID NOs: 775 and 810, respectively;
[0459] h) SEQ ID NOs: 776 and 811, respectively;
[0460] i) SEQ ID NOs: 777 and 812, respectively;
[0461] j) SEQ ID NOs: 778 and 813, respectively;
[0462] k) SEQ ID NOs: 779 and 814, respectively;
[0463] l) SEQ ID NOs: 780 and 815, respectively;
[0464] m) SEQ ID NOs: 781 and 816, respectively;
[0465] n) SEQ ID NOs: 782 and 817, respectively;
[0466] o) SEQ ID NOs: 783 and 818, respectively;
[0467] p) SEQ ID NOs: 784 and 819, respectively;
[0468] q) SEQ ID NOs: 785 and 820, respectively;
[0469] r) SEQ ID NOs: 786 and 821, respectively;
[0470] s) SEQ ID NOs: 787 and 822, respectively;
[0471] t) SEQ ID NOs: 788 and 823, respectively;
[0472] u) SEQ ID NOs: 789 and 824, respectively;
[0473] v) SEQ ID NOs: 790 and 825, respectively;
[0474] w) SEQ ID NOs: 791 and 826, respectively;
[0475] x) SEQ ID NOs: 792 and 827, respectively;
[0476] y) SEQ ID NOs: 793 and 828, respectively;
[0477] z) SEQ ID NOs: 794 and 829, respectively;
[0478] aa) SEQ ID NOs: 795 and 830, respectively;
[0479] bb) SEQ ID NOs: 796 and 831, respectively;
[0480] cc) SEQ ID NOs: 797 and 832, respectively;
[0481] dd) SEQ ID NOs: 798 and 833, respectively;
[0482] ee) SEQ ID NOs: 799 and 834, respectively;
[0483] ff) SEQ ID NOs: 800 and 835, respectively;
[0484] gg) SEQ ID NOs: 801 and 836, respectively;
[0485] hh) SEQ ID NOs: 802 and 837, respectively;
[0486] ii) SEQ ID NOs: 803 and 838, respectively; and
[0487] jj) SEQ ID NOs: 1681 and 815, respectively, wherein the antisense strand comprises a 3′ overhang about 1 to about 20 nucleotides in length (e.g., about 1, 2, 3, 4, 5, 6, 7, 8, 9, 10, 11, 12, 13, 14, 15, 16, 17, 18, 19, or about 20 nucleotides in length), optionally wherein the 3′ overhang is 2 nucleotides in length.

[0488] In some embodiments, the oligonucleotide comprises a sense strand and an antisense strand, wherein the sense and antisense strands of the oligonucleotide comprise nucleotides sequences selected from the group consisting of:
[0489] a) SEQ ID NOs: 771 and 806, respectively;
[0490] b) SEQ ID NOs: 776 and 811, respectively;
[0491] c) SEQ ID NOs: 780 and 815, respectively;
[0492] d) SEQ ID NOs: 781 and 816, respectively;
[0493] e) SEQ ID NOs: 782 and 817, respectively;
[0494] f) SEQ ID NOs: 790 and 825, respectively;
[0495] g) SEQ ID NOs: 795 and 830, respectively;
[0496] h) SEQ ID NOs: 798 and 833, respectively;
[0497] i) SEQ ID NOs: 799 and 834, respectively;
[0498] j) SEQ ID NOs: 803 and 838, respectively; and
[0499] k) SEQ ID NOs: 1681 and 815, respectively, wherein the antisense strand comprises the 3′ overhang about 1 to about 20 nucleotides in length (e.g., about 1, 2, 3, 4, 5, 6, 7, 8, 9, 10, 11, 12, 13, 14, 15, 16, 17, 18, 19, or about 20 nucleotides in length), optionally wherein the 3′ overhang is 2 nucleotides in length.

[0500] In some embodiments, the oligonucleotide comprises a sense strand and an antisense strand, wherein the sense and antisense strands of the oligonucleotide comprise nucleotides sequences selected from the group consisting of:
[0501] a) SEQ ID NO: 771 and 806, respectively;
[0502] b) SEQ ID NO: 780 and 815, respectively;
[0503] c) SEQ ID NO: 781 and 816, respectively;
[0504] d) SEQ ID NO: 798 and 833, respectively;
[0505] e) SEQ ID NO: 799 and 834, respectively;
[0506] f) SEQ ID NO: 803 and 838, respectively; and
[0507] g) SEQ ID NOs: 1681 and 815, respectively, wherein the antisense strand comprises the 3′ overhang about 1 to about 20 nucleotides in length (e.g., about 1, 2, 3, 4, 5, 6, 7, 8, 9, 10, 11, 12, 13, 14, 15, 16, 17, 18, 19, or about 20 nucleotides in length), optionally wherein the 3′ overhang is 2 nucleotides in length.

[0508] In some embodiments, one or more (e.g., 2, 3, 4, 5, or more) nucleotides comprising the 3′ terminus or 5′ terminus of the sense and/or antisense strand are modified. For example, in some embodiments, one or two terminal nucleotides of the 3′ terminus of the antisense strand are modified. In some embodiments, the last nucleotide at the 3′ terminus of an antisense strand is modified, for example, comprises 2′ modification (e.g., a 2′-OMe). In some embodiments, the last one or two terminal nucleotides at the 3′ terminus of an antisense strand are complementary with the target. In some embodiments, the last one or two nucleotides at the 3′ terminus of the antisense strand are not complementary with the target.

[0509] In some embodiments, the oligonucleotide comprises a sense strand and an antisense strand, wherein the 3′ terminus of the sense strand comprises a step-loop and the 3′ terminus of the antisense strand comprises the 3′ overhang. In some embodiments, the oligonucleotide comprises a sense strand and an antisense strand that form a nicked tetraL structure, wherein the 3′ terminus of the sense strand comprises the stem-loop, wherein the loop is a tetraL, and wherein the 3′ terminus of the antisense strand comprises the 3′ overhang described herein. In some embodiments, the 3′ overhang is 2 nucleotides in length. In some embodiments, the 2 nucleotides comprising the 3′ overhang both comprise guanine (G) nucleobases. Typically, one or both of the nucleotides comprising the 3′ overhang of the antisense strand are not complementary with the target mRNA.

[0510] Oligonucleotide Modifications

[0511] In some embodiments, the oligonucleotide (e.g., a RNAi oligonucleotide) comprises a modification. Oligonucleotides may be modified in various ways to improve or control specificity, stability, delivery, bioavailability, resistance from nuclease degradation, immunogenicity, base-pairing properties, RNA distribution and cellular uptake, and other features relevant to therapeutic research use.

[0512] In some embodiments, the modification is a modified sugar. In some embodiments, the modification is a 5′ terminal phosphate group. In some embodiments, the modification is a modified internucleoside linkage. In some embodiments, the modification is a modified base. In some embodiments, the modification is a reversible modification. In some embodiments, the oligonucleotide may comprise any one of the modifications described herein or any combination thereof. For example, in some embodiments, the oligonucleotide comprises at least one modified sugar, a 5′ terminal phosphate group, at least one modified internucleoside linkage, at least one modified base, and at least one reversible modification.

[0513] In some embodiments, the oligonucleotide comprises at least one modified sugar, a 5′ terminal phosphate group, at least one modified internucleotide linkage, and at least one modified base. In some embodiments, the sense and antisense strands of the oligonucleotide comprise nucleotides sequences selected from the group consisting of:
[0514] a) SEQ ID NO: 769 and 804, respectively;
[0515] b) SEQ ID NO: 770 and 805, respectively;
[0516] c) SEQ ID NO: 771 and 806, respectively;
[0517] d) SEQ ID NO: 772 and 807, respectively;
[0518] e) SEQ ID NO: 773 and 808, respectively;
[0519] f) SEQ ID NO: 774 and 809, respectively;
[0520] g) SEQ ID NO: 775 and 810, respectively;
[0521] h) SEQ ID NO: 776 and 811, respectively;
[0522] i) SEQ ID NO: 777 and 812, respectively;
[0523] j) SEQ ID NO: 778 and 813, respectively;
[0524] k) SEQ ID NO: 779 and 814, respectively;
[0525] l) SEQ ID NO: 780 and 815, respectively;
[0526] m) SEQ ID NO: 781 and 816, respectively;
[0527] n) SEQ ID NO: 782 and 817, respectively;
[0528] o) SEQ ID NO: 783 and 818, respectively;
[0529] p) SEQ ID NO: 784 and 819, respectively;
[0530] q) SEQ ID NO: 785 and 820, respectively;
[0531] r) SEQ ID NO: 786 and 821, respectively;
[0532] s) SEQ ID NO: 787 and 822, respectively;
[0533] t) SEQ ID NO: 788 and 823, respectively;
[0534] u) SEQ ID NO: 789 and 824, respectively;
[0535] v) SEQ ID NO: 790 and 825, respectively;
[0536] w) SEQ ID NO: 791 and 826, respectively;
[0537] x) SEQ ID NO: 792 and 827, respectively;
[0538] y) SEQ ID NO: 793 and 828, respectively;
[0539] z) SEQ ID NO: 794 and 829, respectively;
[0540] aa) SEQ ID NO: 795 and 830, respectively;
[0541] bb) SEQ ID NO: 796 and 831, respectively;
[0542] cc) SEQ ID NO: 797 and 832, respectively;
[0543] dd) SEQ ID NO: 798 and 833, respectively;
[0544] ee) SEQ ID NO: 799 and 834, respectively;
[0545] ff) SEQ ID NO: 800 and 835, respectively;
[0546] gg) SEQ ID NO: 801 and 836, respectively;
[0547] hh) SEQ ID NO: 802 and 837, respectively;
[0548] ii) SEQ ID NO: 803 and 838, respectively; and
[0549] jj) SEQ ID NOs: 1681 and 815, respectively, wherein the oligonucleotide comprises at least one modified sugar, a 5′ terminal phosphate group, at least one modified internucleotide linkage, and at least one modified base.

[0550] In some embodiments, the sense and antisense strands of an oligonucleotide comprise nucleotides sequences selected from the group consisting of:
[0551] a) SEQ ID NO: 771 and 806, respectively;
[0552] b) SEQ ID NO: 776 and 811, respectively;
[0553] c) SEQ ID NO: 780 and 815, respectively;
[0554] d) SEQ ID NO: 781 and 816, respectively;
[0555] e) SEQ ID NO: 782 and 817, respectively;
[0556] f) SEQ ID NO: 790 and 825, respectively;
[0557] g) SEQ ID NO: 795 and 830, respectively;
[0558] h) SEQ ID NO: 798 and 833, respectively;
[0559] i) SEQ ID NO: 799 and 834, respectively;
[0560] j) SEQ ID NO: 803 and 838, respectively; and
[0561] k) SEQ ID NOs: 1681 and 815, respectively, wherein the oligonucleotide comprises at least one modified sugar, a 5′ terminal phosphate group, at least one modified internucleotide linkage, and at least one modified base.

[0562] In some embodiments, the sense and antisense strands of an oligonucleotide comprise nucleotides sequences selected from the group consisting of:
[0563] a) SEQ ID NO: 771 and 806, respectively;
[0564] b) SEQ ID NO: 780 and 815, respectively;
[0565] c) SEQ ID NO: 781 and 816, respectively;
[0566] d) SEQ ID NO: 798 and 833, respectively;
[0567] e) SEQ ID NO: 799 and 834, respectively;
[0568] f) SEQ ID NO: 803 and 838, respectively; and
[0569] g) SEQ ID NOs: 1681 and 815, respectively, wherein the oligonucleotide comprises at least one modified sugar, a 5′ terminal phosphate group, at least one modified internucleotide linkage, and at least one modified base.

[0570] The number of modifications on the oligonucleotide and the position of those nucleotide modifications may influence the properties of an oligonucleotide. For example, oligonucleotides may be delivered in vivo by conjugating them to encompassing them in a lipid nanoparticle (LNP) or similar carrier. However, when an oligonucleotide is not protected by an LNP or similar carrier, it may be advantageous for at least some of the nucleotides to be modified. Accordingly, in some embodiments, all or substantially all of the nucleotides of the oligonucleotides are modified. In some embodiments, more than half of the nucleotides are modified. In some embodiments, less than half of the nucleotides are modified. In some embodiments, the sugar moiety of all nucleotides comprising the oligonucleotide is modified at the 2′ position. The modifications may be reversible or irreversible. In some embodiments, an oligonucleotide as disclosed herein has a number and type of modified nucleotides sufficient to cause the desired characteristics (e.g., protection from enzymatic degradation, capacity to target a desired cell after in vivo administration, and/or thermodynamic stability).

[0571] Sugar Modifications

[0572] In some embodiments, the oligonucleotide comprises a modified sugar. In some embodiments, the modified sugar (also referred herein to a sugar analog) includes a modified deoxyribose or ribose moiety in which, for example, one or more modifications occur at the 2′, 3′, 4′, and/or 5′ carbon position of the sugar. In some embodiments, the modified sugar may also include non-natural alternative carbon structures such as those present in locked nucleic acids (“LNA”; see, e.g., Koshkin et al. (1998) TETRAHEDON 54:3607-30), unlocked nucleic acids (“UNA”; see, e.g., Snead et al. (2013) MOL. THER-NUCL. ACIDS 2:e103), and bridged nucleic acids (“BNA”; see, e.g., Imanishi & Obika (2002) CHEM COMMUN. (CAMB) 21:1653-59).

[0573] In some embodiments, a nucleotide modification in a sugar comprises a 2′-modification. In some embodiments, the 2′-modification may be 2′-O-propargyl, 2′-O-propylamin, 2′-amino, 2′-ethyl, 2′-F, EA, 2′-OMe, 2′-MOE, 2′-O-[2-(methylamino)-2-oxoethyl] (2′-O-NMA) or 2′-FANA. In some embodiments, the modification is 2′-F, 2′-OMe or 2′-MOE. In some embodiments, the modification in a sugar comprises a modification of the sugar ring, which may comprise modification of one or more carbons of the sugar ring. For example, the modification of a sugar of a nucleotide may comprise a 2′-oxygen of a sugar is linked to a 1-carbon or 4′-carbon of the sugar, or a 2′-oxygen is linked to the 1-carbon or 4′-carbon via an ethylene or methylene bridge. In some embodiments, the modified nucleotide has an acyclic sugar that lacks a 2′-carbon to 3′-carbon bond. In some embodiments, the modified nucleotide has a thiol group, for example, in the 4′ position of the sugar.

[0574] In some embodiments, the oligonucleotide described herein comprises at least about 1 modified nucleotide (e.g., at least 1, at least 5, at least 10, at least 15, at least 20, at least 25, at least 30, at least 35, at least 40, at least 45, at least 50, at least 55, at least 60, or more). In some embodiments, the sense strand of the RNAi oligonucleotide comprises at least about 1 modified nucleotide (e.g., at least 1, at least 5, at least 10, at least 15, at least 20, at least 25, at least 30, at least 35, or more). In some embodiments, the antisense strand of the oligonucleotide comprises at least about 1 modified nucleotide (e.g., at least 1, at least 5, at least 10, at least 15, at least 20, or more).

[0575] In some embodiments, all the nucleotides of the sense strand of the oligonucleotide are modified. In some embodiments, all the nucleotides of the antisense strand of the oligonucleotide are modified. In some embodiments, all the nucleotides of the oligonucleotide (i.e., both the sense strand and the antisense strand) are modified. In some embodiments, the modified nucleotide comprises a 2′-modification (e.g., a 2′-F or 2′-OMe, 2′-MOE, and 2′-FANA). In some embodiments, the modified nucleotide comprises a 2′-modification (e.g., a 2′-F or 2′-OMe)

[0576] In some embodiments, the disclosure provides oligonucleotides having different modification patterns. In some embodiments, the modified oligonucleotides comprise a sense strand sequence having a modification pattern as set forth in the Examples and Sequence Listing and an antisense strand having a modification pattern as set forth in the Examples and Sequence Listing.

[0577] In some embodiments, the oligonucleotide comprises an antisense strand having nucleotides that are modified with 2′-F. In some embodiments, the oligonucleotide comprises an antisense strand comprises nucleotides that are modified with 2′-F and 2′-OMe. In some embodiments, the oligonucleotide comprises a sense strand having nucleotides that are modified with 2′-F. In some embodiments, the oligonucleotide comprises a sense strand comprising nucleotides that are modified with 2′-F and 2′-OMe.

[0578] In some embodiments, the oligonucleotide comprises a sense strand with about 10-15%, 10%, 11%, 12%, 13%, 14%, or 15% of the nucleotides of the sense strand comprising a 2′-F modification. In some embodiments, the oligonucleotide comprises a sense strand with about 18-23% (e.g., 18%, 19%, 20%, 21%, 22%, or 23%) of the nucleotides of the sense strand comprising a 2′-F modification. In some embodiments, the oligonucleotide comprises a sense strand with about 38-43% (e.g., 38%, 39%, 40%, 41%, 42%, or 43%) of the nucleotides of the sense strand comprising a 2′-F modification. In some embodiments, about 11% of the nucleotides of the sense strand comprise a 2′-F modification. In some embodiments, about 22% of the nucleotides of the sense strand comprise a 2′-F modification. In some embodiments, about 40% of the nucleotides of the sense strand comprise a 2′-F modification. In some embodiments, the oligonucleotide comprises an antisense strand with about 25% to about 35% (e.g., 25%, 26%, 27%, 28%, 29%, 30%, 31%, 32%, 33%, 34%, or 35%) of the nucleotides of the antisense strand comprising a 2′-F modification. In some embodiments, about 32% of the nucleotides of the antisense strand comprise a 2′-F modification. In some embodiments, the oligonucleotide has about 15% to about 25% (e.g., 15%, 16%, 17%, 18%, 19%, 20%, 21%, 22%, 23%, 24%, or 25%) of its nucleotides comprising a 2′-F modification. In some embodiments, the oligonucleotide has about 35-45% (e.g., 35%, 36%, 37%, 38%, 39%, 40%, 41%, 42%, 43%, 44% or 45%) of its nucleotides comprising a 2′-F modification. In some embodiments, about 19% of the nucleotides in the oligonucleotide comprise a 2′-F modification. In some embodiments, about 29% of the nucleotides in the oligonucleotide comprise a 2′-F modification. In some embodiments, about 40% of the nucleotides in the oligonucleotide comprise a 2′-F modification.

[0579] In some embodiments, one or more of positions 8, 9, 10, or 11 of a 36-nucleotide sense strand are modified with a 2′-F group. In some embodiments, one or more of positions 8, 9, 10, or 11 of a sense strand comprising a stem-loop are modified with a 2′-F group. In some embodiments, the sugar moiety at each of nucleotides at positions 1-7 and 12-20 of a 36-nucleotide sense strand is modified with a 2′-OMe. In some embodiments, the sugar moiety at each of nucleotides at positions 1-7 and 12-20 of a sense strand comprising a stem-loop is modified with a 2′-OMe. In some embodiments, the sugar moiety at each of nucleotides at positions 1-7 and 12-36 in the sense strand is modified with a 2′-OMe.

[0580] In some embodiments, one or more of positions 3, 5, 8, 10, 12, 13, 15, and 17 of the sense strand are modified with a 2′-F.

[0581] In some embodiments, the antisense strand has 3 nucleotides that are modified at the 2′-position of the sugar moiety with a 2′-F. In some embodiments, the sugar moiety at positions 2, 5 and 14 and optionally up to 3 of the nucleotides at positions 1, 3, 7, and 10 of the antisense strand are modified with a 2′-F. In some embodiments, the sugar moiety at positions 2, 5, and 14 and optionally up to 3 of the nucleotides at positions 3, 4, 7, and 10 of the antisense strand are modified with a 2′-F. In other embodiments, the sugar moiety at each of the positions at positions 2, 5, and 14 of the antisense strand is modified with the 2′-F. In other embodiments, the sugar moiety at each of the positions at positions 1, 2, 5, and 14 of the antisense strand is modified with the 2′-F. In other embodiments, the sugar moiety at each of the positions at positions 2, 4, 5, and 14 of the antisense strand is modified with the 2′-F. In still other embodiments, the sugar moiety at each of the positions at positions 1, 2, 3, 5, 7, and 14 of the antisense strand is modified with the 2′-F. In other embodiments, the sugar moiety at each of the positions at positions 2, 3, 4, 5, 7, and 14 of the antisense strand is modified with the 2′-F. In yet another embodiment, the sugar moiety at each of the positions at positions 1, 2, 3, 5, 10, and 14 of the antisense strand is modified with the 2′-F. In other embodiments, the sugar moiety at each of the positions at positions 2, 3, 4, 5, 10, and 14 of the antisense strand is modified with the 2′-F. In another embodiment, the sugar moiety at each of the positions at positions 2, 3, 5, 7, 10, and 14 of the antisense strand is modified with the 2′-F. In other embodiments, the sugar moiety at each of the positions at positions 2, 3, 4, 5, 7, 10, and 14 of an antisense strand duplexed with a 36-nucleotide sense strand is modified with the 2′-F. In other embodiments, the sugar moiety at each of the positions at positions 2, 3, 4, 5, 7, 10, and 14 of an antisense strand duplexed with a sense strand comprising a stem-loop is modified with the 2′-F.

[0582] In some embodiments, the oligonucleotide comprises an antisense strand having the sugar moiety at positions 2 and 14 modified with 2′-F. In some embodiments, the oligonucleotide comprises an antisense strand having the sugar moiety at positions 2, 5, and 14 modified with 2′-F. In some embodiments, the oligonucleotide comprises an antisense strand having the sugar moiety at positions 1, 2, 5, and 14 modified with 2′-F. In some embodiments, the oligonucleotide comprises an antisense strand having the sugar moiety at positions 2, 4, 5, and 14 modified with 2′-F. In some embodiments, the oligonucleotide comprises an antisense strand having the sugar moiety at positions 1, 2, 3, 5, 7, and 14 modified with 2′-F. In some embodiments, the oligonucleotide comprises an antisense strand having the sugar moiety at positions 2, 3, 4, 5, 7, and 14 modified with 2′-F. In some embodiments, the oligonucleotide comprises an antisense strand having the sugar moiety at positions 1, 2, 3, 5, 10, and 14 modified with 2′-F. In some embodiments, the oligonucleotide comprises an antisense strand having the sugar moiety at positions 2, 3, 4, 5, 10, and 14 modified with 2′-F. In some embodiments, the oligonucleotide comprises a 36-nucleotide sense strand and an antisense strand, wherein the antisense strand comprises a sugar moiety at positions 2, 3, 4, 5, 7, 10, and 14 modified with 2′-F. In some embodiments, the oligonucleotide comprises a sense strand comprising a stem-loop and an antisense strand, wherein the antisense strand comprises a sugar moiety at positions 2, 3, 4, 5, 7, 10, and 14 modified with 2′-F. In some embodiments, the oligonucleotide comprises an antisense strand having the sugar moiety at positions 2, 3, 4, 5, 7, 10, 14, 16, and 19 modified with 2′-F.

[0583] In some embodiments, the oligonucleotide comprises an antisense strand having the sugar moiety of each of the nucleotides at positions 2, 5, and 14 of the antisense strand modified with 2′-F and the sugar moiety of each of the remaining nucleotides of the antisense strand modified with a modification selected from the group consisting of 2′-O-propargyl, 2′-O-propylamin, 2′-amino, 2′-ethyl, EA, 2′-OMe, 2′-MOE, 2′-O-NMA, and 2′-FANA.

[0584] In some embodiments, the oligonucleotide comprises an antisense strand having the sugar moiety of each of the nucleotides at positions 1, 2, 5, and 14 of the antisense strand modified with 2′-F and the sugar moiety of each of the remaining nucleotides of the antisense strand modified with a modification selected from the group consisting of 2′-O-propargyl, 2′-O-propylamin, 2′-amino, 2′-ethyl, EA, 2′-OMe, 2′-MOE, 2′-O-NMA, and 2′-FANA.

[0585] In some embodiments, the oligonucleotide comprises an antisense strand having the sugar moiety of each of the nucleotides at positions 2, 4, 5, and 14 of the antisense strand modified with 2′-F and the sugar moiety of each of the remaining nucleotides of the antisense strand modified with a modification selected from the group consisting of 2′-O-propargyl, 2′-O-propylamin, 2′-amino, 2′-ethyl, EA, 2′-OMe, 2′-MOE, 2′-O-NMA, and 2′-FANA.

[0586] In some embodiments, the oligonucleotide comprises an antisense strand having the sugar moiety of each of the nucleotides at positions 1, 2, 3, 5, 7, and 14 of the antisense strand modified with 2′-F and the sugar moiety of each of the remaining nucleotides of the antisense strand modified with a modification selected from the group consisting of 2′-O-propargyl, 2′-O-propylamin, 2′-amino, 2′-ethyl, EA, 2′-OMe, 2′-MOE, 2′-O-NMA, and 2′-FANA.

[0587] In some embodiments, the oligonucleotide comprises an antisense strand having the sugar moiety of each of the nucleotides at positions 2, 3, 4, 5, 7, and 14 of the antisense strand modified with 2′-F and the sugar moiety of each of the remaining nucleotides of the antisense strand modified with a modification selected from the group consisting of 2′-O-propargyl, 2′-O-propylamin, 2′-amino, 2′-ethyl, EA, 2′-OMe, 2′-MOE, 2′-O-NMA, and 2′-FANA.

[0588] In some embodiments, the oligonucleotide comprises an antisense strand having the sugar moiety of each of the nucleotides at positions 1, 2, 3, 5, 10, and 14 of the antisense strand modified with 2′-F and the sugar moiety of each of the remaining nucleotides of the antisense strand modified with a modification selected from the group consisting of 2′-O-propargyl, 2′-O-propylamin, 2′-amino, 2′-ethyl, EA, 2′-OMe, 2′-MOE, 2′-O-NMA, and 2′-FANA.

[0589] In some embodiments, the oligonucleotide comprises an antisense strand having the sugar moiety of each of the nucleotides at positions 2, 3, 4, 5, 10, and 14 of the antisense strand modified with 2′-F and the sugar moiety of each of the remaining nucleotides of the antisense strand modified with a modification selected from the group consisting of 2′-O-propargyl, 2′-O-propylamin, 2′-amino, 2′-ethyl, EA, 2′-OMe, 2′-MOE, 2′-O-NMA, and 2′-FANA.

[0590] In some embodiments, the oligonucleotide comprises an antisense strand having the sugar moiety of each of the nucleotides at positions 2, 3, 5, 7, 10, and 14 of the antisense strand modified with 2′-F and the sugar moiety of each of the remaining nucleotides of the antisense strand modified with a modification selected from the group consisting of 2′-O-propargyl, 2′-O-propylamin, 2′-amino, 2′-ethyl, EA, 2′-OMe, 2′-MOE, 2′-O-NMA, and 2′-FANA.

[0591] In some embodiments, the oligonucleotide comprises a 36-nucleotide sense strand and an antisense strand, wherein the antisense strand comprising a sugar moiety at positions 2, 3, 4, 5, 7, 10, and 14 of the antisense strand modified with 2′-F and the sugar moiety of each of the remaining nucleotides of the antisense strand modified with a modification selected from the group consisting of 2′-O-propargyl, 2′-O-propylamin, 2′-amino, 2′-ethyl, EA, 2′-OMe, 2′-MOE, 2′-O-NMA, and 2′-FANA. In some embodiments, the oligonucleotide comprises a sense strand comprising a stem-loop and an antisense strand, wherein the antisense strand comprising a sugar moiety at positions 2, 3, 4, 5, 7, 10, and 14 of the antisense strand modified with 2′-F and the sugar moiety of each of the remaining nucleotides of the antisense strand modified with a modification selected from the group consisting of 2′-O-propargyl, 2′-O-propylamin, 2′-amino, 2′-ethyl, EA, 2′-OMe, 2′-MOE, 2′-O-NMA, and 2′-FANA.

[0592] In some embodiments, the oligonucleotide comprises an antisense strand having the sugar moiety of each of the nucleotides at positions 2, 3, 4, 5, 7, 10, 14, 16, and 19 of the antisense strand modified with 2′-F and the sugar moiety of each of the remaining nucleotides of the antisense strand modified with a modification selected from the group consisting of 2′-O-propargyl, 2′-O-propylamin, 2′-amino, 2′-ethyl, EA, 2′-OMe, 2′-MOE, 2′-O-NMA, and 2′-FANA.

[0593] In some embodiments, the oligonucleotide comprises an antisense strand having the sugar moiety at position 1, position 2, position 3, position 4, position 5, position 6, position 7, position 8, position 9, position 10, position 11, position 12, position 13, position 14, position 15, position 16, position 17, position 18, position 19, position 20, position 21, or position 22 modified with 2′-F.

[0594] In some embodiments, the oligonucleotide comprises an antisense strand having the sugar moiety at position 1, position 2, position 3, position 4, position 5, position 6, position 7, position 8, position 9, position 10, position 11, position 12, position 13, position 14, position 15, position 16, position 17, position 18, position 19, position 20, position 21, or position 22 modified with 2′-OMe.

[0595] In some embodiments, the oligonucleotide comprises an antisense strand having the sugar moiety at position 1, position 2, position 3, position 4, position 5, position 6, position 7, position 8, position 9, position 10, position 11, position 12, position 13, position 14, position 15, position 16, position 17, position 18, position 19, position 20, position 21, or position 22 modified with a modification selected from the group consisting of 2′-O-propargyl, 2′-O-propylamin, 2′-amino, 2′-ethyl, EA, 2′-OMe, 2′-MOE, 2′-O-NMA, and 2′-FANA.

[0596] In some embodiments, the oligonucleotide comprises a 36-nucleotide sense strand having the sugar moiety at positions 8-11 modified with 2′-F. In some embodiments, the oligonucleotide comprises a sense strand comprising a stem-loop and the sugar moiety at positions 8-11 modified with 2′-F. In some embodiments, the oligonucleotide comprises a 36-nucleotide sense strand having the sugar moiety at positions 1-7 and 12-17 or 12-20 modified with 2′-OMe. In some embodiments, the oligonucleotide comprises a sense strand comprising a stem loop and the sugar moiety at positions 1-7 and 12-17 or 12-20 modified with 2′-OMe. In some embodiments, the oligonucleotide comprises a 36-nucleotide sense strand having the sugar moiety at positions 1-7 and 12-17, 12-20 or 12-22 modified with 2′-OMe. In some embodiments, the oligonucleotide comprises a sense strand comprising a stem-loop and the sugar moiety at positions 1-7 and 12-17, 12-20, or 12-22 modified with 2′-OMe. In some embodiments, the oligonucleotide comprises a 36-nucleotide sense strand having the sugar moiety of each of the nucleotides at positions 1-7 and 12-17 or 12-20 of the sense strand modified with a modification selected from the group consisting of 2′-O-propargyl, 2′-O-propylamin, 2′-amino, 2′-ethyl, EA, 2′-OMe, 2′-MOE, 2′-O-NMA, and 2′-FANA. In some embodiments, the oligonucleotide comprises a sense strand comprising and stem-loop and having the sugar moiety of each of the nucleotides at positions 1-7 and 12-17 or 12-20 of the sense strand modified with a modification selected from the group consisting of 2′-O-propargyl, 2′-O-propylamin, 2′-amino, 2′-ethyl, EA, 2′-OMe, 2′-MOE, 2′-O-NMA, and 2′-FANA. In some embodiments, the oligonucleotide comprises a 36-nucleotide sense strand having the sugar moiety of each of the nucleotides at positions 1-7 and 12-17, 12-20, or 12-22 of the sense strand modified with a modification selected from the group consisting of 2′-O-propargyl, 2′-O-propylamin, 2′-amino, 2′-ethyl, EA, 2′-OMe, 2′-MOE, 2′-O-NMA, and 2′-FANA. In some embodiments, the oligonucleotide comprises a sense strand comprising a stem-loop and the sugar moiety of each of the nucleotides at positions 1-7 and 12-17, 12-20, or 12-22 of the sense strand modified with a modification selected from the group consisting of 2′-O-propargyl, 2′-O-propylamin, 2′-amino, 2′-ethyl, EA, 2′-OMe, 2′-MOE, 2′-O-NMA, and 2′-FANA.

[0597] In some embodiments, the oligonucleotide comprises a sense strand having the sugar moiety at positions 3, 5, 8, 10, 12, 13, 15, and 17 modified with 2′-F. In some embodiments, the oligonucleotide comprises a sense strand having the sugar moiety at positions 1, 2, 4, 6, 7, 9, 11, 14, 16, and 18-20 modified with 2′-OMe. In some embodiments, the oligonucleotide comprises a sense strand having the sugar moiety of each of the nucleotides at positions 1, 2, 4, 6, 7, 9, 11, 14, 16, and 18-20 of the sense strand modified with a modification selected from the group consisting of 2′-O-propargyl, 2′-O-propylamin, 2′-amino, 2′-ethyl, EA, 2′-OMe, 2′-MOE, 2′-O-NMA, and 2′-FANA. In some embodiments, the oligonucleotide comprises a sense strand having the sugar moiety of each of the nucleotides at positions 1-7 and 12-17, 12-20, or 12-22 of the sense strand modified with a modification selected from the group consisting of 2′-O-propargyl, 2′-O-propylamin, 2′-amino, 2′-ethyl, EA, 2′-OMe, 2′-MOE, 2′-O-NMA, and 2′-FANA.

[0598] In some embodiments, the oligonucleotide comprises a sense strand having the sugar moiety at position 1, position 2, position 3, position 4, position 5, position 6, position 7, position 8, position 9, position 10, position 11, position 12, position 13, position 14, position 15, position 16, position 17, position 18, position 19, position 20, position 21, position 22, position 23, position 24, position 25, position 26, position 27, position 28, position 29, position 30, position 31, position 32, position 33, position 34, position 35, or position 36 modified with 2′-F.

[0599] In some embodiments, the oligonucleotide comprises a sense strand having the sugar moiety at position 1, position 2, position 3, position 4, position 5, position 6, position 7, position 8, position 9, position 10, position 11, position 12, position 13, position 14, position 15, position 16, position 17, position 18, position 19, position 20, position 21, position 22, position 23, position 24, position 25, position 26, position 27, position 28, position 29, position 30, position 31, position 32, position 33, position 34, position 35, or position 36 modified with 2′-OMe.

[0600] In some embodiments, the oligonucleotide comprises a sense strand having the sugar moiety at position 1, position 2, position 3, position 4, position 5, position 6, position 7, position 8, position 9, position 10, position 11, position 12, position 13, position 14, position 15, position 16, position 17, position 18, position 19, position 20, position 21, position 22, position 23, position 24, position 25, position 26, position 27, position 28, position 29, position 30, position 31, position 32, position 33, position 34, position 35, or position 36 modified with a modification selected from the group consisting of 2′-O-propargyl, 2′-O-propylamin, 2′-amino, 2′-ethyl, EA, 2′-OMe, 2′-MOE, 2′-O-NMA, and 2′-FANA.

[0601] In some embodiments, the oligonucleotide comprises an antisense strand having the sugar moiety of each of the nucleotides at positions 2, 3, 4, 5, 7, 10, and 14 of the antisense strand modified with 2′-F, and the sugar moiety of each of the remaining nucleotides of the antisense strand modified with a modification selected from the group consisting of 2′-O-propargyl, 2′-O-propylamin, 2′-amino, 2′-ethyl, EA, 2′-OMe, 2′-MOE, 2′-O-NMA, and 2′-deoxy-2′-fluoro-β-d-arabinonucleic acid (2′-FANA); and a 36-nucleotide sense strand having the sugar moiety at each of the nucleotides at positions 8-11 of the sense strand modified with 2′-F, and the sugar moiety of each of the remaining nucleotides of the antisense strand modified with a modification selected from the group consisting of 2′-O-propargyl, 2′-O-propylamin, 2′-amino, 2′-ethyl, EA, 2′-OMe, 2′-MOE, 2′-O-NMA, and 2′-deoxy-2′-fluoro-β-d-arabinonucleic acid (2′-FANA). In some embodiments, the oligonucleotide comprises an antisense strand having the sugar moiety of each of the nucleotides at positions 2, 3, 4, 5, 7, 10, and 14 of the antisense strand modified with 2′-F, and the sugar moiety of each of the remaining nucleotides of the antisense strand modified with a modification selected from the group consisting of 2′-O-propargyl, 2′-O-propylamin, 2′-amino, 2′-ethyl, EA, 2′-OMe, 2′-MOE, 2′-O-NMA, and 2′-FANA; and a sense strand comprising a stem-loop and the sugar moiety at each of the nucleotides at positions 8-11 of the sense strand modified with 2′-F, and the sugar moiety of each of the remaining nucleotides of the antisense strand modified with a modification selected from the group consisting of 2′-O-propargyl, 2′-O-propylamin, 2′-amino, 2′-ethyl, 2′-EA, 2′-OMe, 2′-MOE, 2′-O-NMA, and 2′-FANA.

[0602] In some embodiments, the oligonucleotide comprises an antisense strand having the sugar moiety of each of the nucleotides at positions 2, 3, 4, 5, 7, 10, 14, 16, and 19 of the antisense strand modified with 2′-F, and the sugar moiety of each of the remaining nucleotides of the antisense strand modified with a modification selected from the group consisting of 2′-O-propargyl, 2′-O-propylamin, 2′-amino, 2′-ethyl, EA, 2′-OMe, 2′-MOE, 2′-O-NMA, and 2′-FANA; and a sense strand having the sugar moiety at each of the nucleotides at positions 3, 5, 8, 10, 12, 13, 15, and 17 of the sense strand modified with 2′-F, and the sugar moiety of each of the remaining nucleotides of the antisense strand modified with a modification selected from the group consisting of 2′-O-propargyl, 2′-O-propylamin, 2′-amino, 2′-ethyl, EA, 2′-OMe, 2′-MOE, 2′-O-NMA, and 2′-FANA.

[0603] In some embodiments, the sense and antisense strands of an oligonucleotide comprise nucleotides sequences selected from the group consisting of:
[0604] a) SEQ ID NO: 769 and 804, respectively;
[0605] b) SEQ ID NO: 770 and 805, respectively;
[0606] c) SEQ ID NO: 771 and 806, respectively;
[0607] d) SEQ ID NO: 772 and 807, respectively;
[0608] e) SEQ ID NO: 773 and 808, respectively;
[0609] f) SEQ ID NO: 774 and 809, respectively;
[0610] g) SEQ ID NO: 775 and 810, respectively;
[0611] h) SEQ ID NO: 776 and 811, respectively;
[0612] i) SEQ ID NO: 777 and 812, respectively;
[0613] j) SEQ ID NO: 778 and 813, respectively;
[0614] k) SEQ ID NO: 779 and 814, respectively;
[0615] l) SEQ ID NO: 780 and 815, respectively;
[0616] m) SEQ ID NO: 781 and 816, respectively;
[0617] n) SEQ ID NO: 782 and 817, respectively;
[0618] o) SEQ ID NO: 783 and 818, respectively;
[0619] p) SEQ ID NO: 784 and 819, respectively;
[0620] q) SEQ ID NO: 785 and 820, respectively;
[0621] r) SEQ ID NO: 786 and 821, respectively;
[0622] s) SEQ ID NO: 787 and 822, respectively;
[0623] t) SEQ ID NO: 788 and 823, respectively;
[0624] u) SEQ ID NO: 789 and 824, respectively;
[0625] v) SEQ ID NO: 790 and 825, respectively;
[0626] w) SEQ ID NO: 791 and 826, respectively;
[0627] x) SEQ ID NO: 792 and 827, respectively;
[0628] y) SEQ ID NO: 793 and 828, respectively;
[0629] z) SEQ ID NO: 794 and 829, respectively;
[0630] aa) SEQ ID NO: 795 and 830, respectively;
[0631] bb) SEQ ID NO: 796 and 831, respectively;
[0632] cc) SEQ ID NO: 797 and 832, respectively;
[0633] dd) SEQ ID NO: 798 and 833, respectively;
[0634] ee) SEQ ID NO: 799 and 834, respectively;
[0635] ff) SEQ ID NO: 800 and 835, respectively;
[0636] gg) SEQ ID NO: 801 and 836, respectively;
[0637] hh) SEQ ID NO: 802 and 837, respectively;
[0638] ii) SEQ ID NO: 803 and 838, respectively; and
[0639] jj) SEQ ID NOs: 1681 and 815, respectively, wherein one or more of positions 3, 5, 8, 10, 12, 13, 15, or 17 of the sense strand are modified with a 2′-F group.

[0640] In some embodiments, the sense and antisense strands of an oligonucleotide comprise nucleotides sequences selected from the group consisting of:
[0641] a) SEQ ID NOs: 771 and 806, respectively;
[0642] b) SEQ ID NOs: 776 and 811, respectively;
[0643] c) SEQ ID NOs: 780 and 815, respectively;
[0644] d) SEQ ID NOs: 781 and 816, respectively;
[0645] e) SEQ ID NOs: 782 and 817, respectively;
[0646] f) SEQ ID NOs: 790 and 825, respectively;
[0647] g) SEQ ID NOs: 795 and 830, respectively;
[0648] h) SEQ ID NOs: 798 and 833, respectively;
[0649] i) SEQ ID NOs: 799 and 834, respectively;
[0650] j) SEQ ID NOs: 803 and 838, respectively; and
[0651] k) SEQ ID NOs: 1681 and 815, respectively, wherein one or more of positions 3, 5, 8, 10, 12, 13, 15, or 17 of the sense strand is modified with a 2′-F group.

[0652] In some embodiments, the sense and antisense strands of an oligonucleotide comprise nucleotides sequences selected from the group consisting of:
[0653] a) SEQ ID NOs: 771 and 806, respectively;
[0654] b) SEQ ID NOs: 780 and 815, respectively;
[0655] c) SEQ ID NOs: 781 and 816, respectively;
[0656] d) SEQ ID NOs: 798 and 833, respectively;
[0657] e) SEQ ID NOs: 799 and 834, respectively;
[0658] f) SEQ ID NOs: 803 and 838, respectively; and
[0659] g) SEQ ID NOs: 1681 and 815, respectively, wherein one or more of positions 3, 5, 8, 10, 12, 13, 15, or 17 of the sense strand is modified with a 2′-F group.

[0660] 5′ Terminal Phosphate

[0661] In some embodiments, the oligonucleotide comprises a sense strand and an antisense strand, wherein the antisense strand comprises a 5′ terminal phosphate. In some embodiments, 5′ terminal phosphate groups of the oligonucleotide enhance the interaction with Ago2. However, oligonucleotides comprising a 5′-phosphate group may be susceptible to degradation via phosphatases or other enzymes, which can limit their bioavailability in vivo. In some embodiments, the oligonucleotide includes analogs of 5′ phosphates that are resistant to such degradation. In some embodiments, the phosphate analog is oxymethyl phosphonate, vinyl phosphonate or malonyl phosphonate, or a combination thereof. In certain embodiments, the 5′ end of the oligonucleotide strand is attached to chemical moiety that mimics the electrostatic and steric properties of a natural 5′-phosphate group (“phosphate mimic”).

[0662] In some embodiments, the oligonucleotide has a phosphate analog at a 4′-carbon position of the sugar (referred to as a “4′-phosphate analog”). See, e.g., Intl. Patent Application Publication No. WO 2018/045317. In some embodiments, the oligonucleotide comprises a 4′-phosphate analog at a 5′ terminal nucleotide. In some embodiments, the phosphate analog is an oxymethyl phosphonate, in which the oxygen atom of the oxymethyl group is bound to the sugar moiety (e.g., at its 4′-carbon) or analog thereof. In other embodiments, the 4′-phosphate analog is a thiomethylphosphonate or an aminomethylphosphonate, in which the sulfur atom of the thiomethyl group or the nitrogen atom of the amino methyl group is bound to the 4′-carbon of the sugar moiety or analog thereof. In certain embodiments, the 4′-phosphate analog is an oxymethyl phosphonate. In some embodiments, the oxymethyl phosphonate is represented by the formula —O—CH₂—PO(OH)₂, —O—CH₂—PO(OR)₂, or —O—CH2-POOH(R), in which R is independently selected from H, CH₃, an alkyl group, CH₂CH₂CN, CH₂OCOC(CH₃)₃, CH₂OCH₂CH₂Si (CH₃)₃ or a protecting group. In certain embodiments, the alkyl group is CH₂CH₃. More typically, R is independently selected from H, CH₃ or CH₂CH₃. In some embodiment, R is CH₃. In some embodiments, the 4′-phosphate analog is 4′-oxymethylphosphonate. In some embodiments, the modified nucleotide having the 4′-phosphonate analog is a uridine. In some embodiments, the modified nucleotide is 4′-O-monomethylphosphonate-2′-O-methyl uridine.

[0663] In some embodiments, the sense and antisense strands of the oligonucleotide comprise nucleotides sequences selected from the group consisting of:
[0664] a) SEQ ID NOs: 769 and 804, respectively;
[0665] b) SEQ ID NOs: 770 and 805, respectively;
[0666] c) SEQ ID NOs: 771 and 806, respectively;
[0667] d) SEQ ID NOs: 772 and 807, respectively;
[0668] e) SEQ ID NOs: 773 and 808, respectively;
[0669] f) SEQ ID NOs: 774 and 809, respectively;
[0670] g) SEQ ID NOs: 775 and 810, respectively;
[0671] h) SEQ ID NOs: 776 and 811, respectively;
[0672] i) SEQ ID NOs: 777 and 812, respectively;
[0673] j) SEQ ID NOs: 778 and 813, respectively;
[0674] k) SEQ ID NOs: 779 and 814, respectively;
[0675] l) SEQ ID NOs: 780 and 815, respectively;
[0676] m) SEQ ID NOs: 781 and 816, respectively;
[0677] n) SEQ ID NOs: 782 and 817, respectively;
[0678] o) SEQ ID NOs: 783 and 818, respectively;
[0679] p) SEQ ID NOs: 784 and 819, respectively;
[0680] q) SEQ ID NOs: 785 and 820, respectively;
[0681] r) SEQ ID NOs: 786 and 821, respectively;
[0682] s) SEQ ID NOs: 787 and 822, respectively;
[0683] t) SEQ ID NOs: 788 and 823, respectively;
[0684] u) SEQ ID NOs: 789 and 824, respectively;
[0685] v) SEQ ID NOs: 790 and 825, respectively;
[0686] w) SEQ ID NOs: 791 and 826, respectively;
[0687] x) SEQ ID NOs: 792 and 827, respectively;
[0688] y) SEQ ID NOs: 793 and 828, respectively;
[0689] z) SEQ ID NOs: 794 and 829, respectively;
[0690] aa) SEQ ID NOs: 795 and 830, respectively;
[0691] bb) SEQ ID NOs: 796 and 831, respectively;
[0692] cc) SEQ ID NOs: 797 and 832, respectively;
[0693] dd) SEQ ID NOs: 798 and 833, respectively;
[0694] ee) SEQ ID NOs: 799 and 834, respectively;
[0695] ff) SEQ ID NOs: 800 and 835, respectively;
[0696] gg) SEQ ID NOs: 801 and 836, respectively;
[0697] hh) SEQ ID NOs: 802 and 837, respectively;
[0698] ii) SEQ ID NOs: 803 and 838, respectively; and
[0699] jj) SEQ ID NOs: 1681 and 815, respectively, wherein the oligonucleotide comprises a 5′ terminal phosphate, optionally a 5′ terminal phosphate analog.

[0700] In some embodiments, the sense and antisense strands of the oligonucleotide comprise nucleotides sequences selected from the group consisting of:
[0701] a) SEQ ID NOs: 771 and 806, respectively;
[0702] b) SEQ ID NOs: 776 and 811, respectively;
[0703] c) SEQ ID NOs: 780 and 815, respectively;
[0704] d) SEQ ID NOs: 781 and 816, respectively;
[0705] e) SEQ ID NOs: 782 and 817, respectively;
[0706] f) SEQ ID NOs: 790 and 825, respectively;
[0707] g) SEQ ID NOs: 795 and 830, respectively;
[0708] h) SEQ ID NOs: 798 and 833, respectively;
[0709] i) SEQ ID NOs: 799 and 834, respectively;
[0710] j) SEQ ID NOs: 803 and 838, respectively; and
[0711] k) SEQ ID NOs: 1681 and 815, respectively, wherein the oligonucleotide comprises a 5′ terminal phosphate, optionally a 5′ terminal phosphate analog.

[0712] In some embodiments, the sense and antisense strands of an oligonucleotide comprise nucleotides sequences selected from the group consisting of:
[0713] a) SEQ ID NOs: 771 and 806, respectively;
[0714] b) SEQ ID NOs: 780 and 815, respectively;
[0715] c) SEQ ID NOs: 781 and 816, respectively;
[0716] d) SEQ ID NOs: 798 and 833, respectively;
[0717] e) SEQ ID NOs: 799 and 834, respectively;
[0718] f) SEQ ID NOs: 803 and 838, respectively; and
[0719] g) SEQ ID NOs: 1681 and 815, respectively, wherein the oligonucleotide comprises a 5′ terminal phosphate, optionally a 5′ terminal phosphate analog.

[0720] In some embodiments, the oligonucleotide comprises an antisense strand comprising a 4′-phosphate analog at the 5′ terminal nucleotide, wherein 5′ terminal nucleotide comprises the following structure:

[chemical structure]

4′-O-monomethylphosphonate-2′-O-methyl uridine phosphorothioate [MePhosphonate-4O-mUs].

[0721] Modified Internucleotide Linkage

[0722] In some embodiments, an oligonucleotide herein (e.g., a RNAi oligonucleotide) comprises a modified internucleotide linkage. In some embodiments, phosphate modifications or substitutions result in an oligonucleotide that comprises at least about 1 (e.g., at least 1, at least 2, at least 3, or at least 5) modified internucleotide linkage. In some embodiments, the oligonucleotide comprises about 1 to about 10 (e.g., 1 to 10, 2 to 8, 4 to 6, 3 to 10, 5 to 10, 1 to 5, 1 to 3, or 1 to 2) modified internucleotide linkages. In some embodiments, the oligonucleotide comprises 1, 2, 3, 4, 5, 6, 7, 8, 9, or 10 modified internucleotide linkages.

[0723] A modified internucleotide linkage may be a phosphorodithioate linkage, a phosphorothioate linkage, a phosphotriester linkage, a thionoalkylphosphonate linkage, a thionalkylphosphotriester linkage, a phosphoramidite linkage, a phosphonate linkage or a boranophosphate linkage. In some embodiments, at least one modified internucleotide linkage of the oligonucleotide is a phosphorothioate linkage.

[0724] In some embodiments, the oligonucleotide has a phosphorothioate linkage between one or more of positions 1 and 2 of the sense strand, positions 1 and 2 of the antisense strand, positions 2 and 3 of the antisense strand, positions 3 and 4 of the antisense strand, positions 20 and 21 of the antisense strand, and positions 21 and 22 of the antisense strand. In some embodiments, the oligonucleotide described herein has a phosphorothioate linkage between each of positions 1 and 2 of the sense strand, positions 1 and 2 of the antisense strand, positions 2 and 3 of the antisense strand, positions 20 and 21 of the antisense strand, and positions 21 and 22 of the antisense strand. In some embodiments, the oligonucleotide described herein has a phosphorothioate linkage between each of (i) positions 1 and 2 of the sense strand; and (ii) positions 1 and 2, positions 2 and 3, positions 3 and 4, positions 20 and 21, and positions 21 and 22 of the antisense strand.

[0725] In some embodiments, the sense and antisense strands of an oligonucleotide comprise nucleotides sequences selected from the group consisting of:
[0726] a) SEQ ID NOs: 769 and 804, respectively;
[0727] b) SEQ ID NOs: 770 and 805, respectively;
[0728] c) SEQ ID NOs: 771 and 806, respectively;
[0729] d) SEQ ID NOs: 772 and 807, respectively;
[0730] e) SEQ ID NOs: 773 and 808, respectively;
[0731] f) SEQ ID NOs: 774 and 809, respectively;
[0732] g) SEQ ID NOs: 775 and 810, respectively;
[0733] h) SEQ ID NOs: 776 and 811, respectively;
[0734] i) SEQ ID NOs: 777 and 812, respectively;
[0735] j) SEQ ID NOs: 778 and 813, respectively;
[0736] k) SEQ ID NOs: 779 and 814, respectively;
[0737] l) SEQ ID NOs: 780 and 815, respectively;
[0738] m) SEQ ID NOs: 781 and 816, respectively;
[0739] n) SEQ ID NOs: 782 and 817, respectively;
[0740] o) SEQ ID NOs: 783 and 818, respectively;
[0741] p) SEQ ID NOs: 784 and 819, respectively;
[0742] q) SEQ ID NOs: 785 and 820, respectively;
[0743] r) SEQ ID NOs: 786 and 821, respectively;
[0744] s) SEQ ID NOs: 787 and 822, respectively;
[0745] t) SEQ ID NOs: 788 and 823, respectively;
[0746] u) SEQ ID NOs: 789 and 824, respectively;
[0747] v) SEQ ID NOs: 790 and 825, respectively;
[0748] w) SEQ ID NOs: 791 and 826, respectively;
[0749] x) SEQ ID NOs: 792 and 827, respectively;
[0750] y) SEQ ID NOs: 793 and 828, respectively;
[0751] z) SEQ ID NOs: 794 and 829, respectively;
[0752] aa) SEQ ID NOs: 795 and 830, respectively;
[0753] bb) SEQ ID NOs: 796 and 831, respectively;
[0754] cc) SEQ ID NOs: 797 and 832, respectively;
[0755] dd) SEQ ID NOs: 798 and 833, respectively;
[0756] ee) SEQ ID NOs: 799 and 834, respectively;
[0757] ff) SEQ ID NOs: 800 and 835, respectively;
[0758] gg) SEQ ID NOs: 801 and 836, respectively;
[0759] hh) SEQ ID NOs: 802 and 837, respectively;
[0760] ii) SEQ ID NOs: 803 and 838, respectively; and
[0761] jj) SEQ ID NOs: 1681 and 815, respectively, wherein the oligonucleotide comprises a modified internucleotide linkage.

[0762] In some embodiments, the sense and antisense strands of an oligonucleotide comprise nucleotides sequences selected from the group consisting of:
[0763] a) SEQ ID NOs: 771 and 806, respectively;
[0764] b) SEQ ID NOs: 776 and 811, respectively;
[0765] c) SEQ ID NOs: 780 and 815, respectively;
[0766] d) SEQ ID NOs: 781 and 816, respectively;
[0767] e) SEQ ID NOs: 782 and 817, respectively;
[0768] f) SEQ ID NOs: 790 and 825, respectively;
[0769] g) SEQ ID NOs: 795 and 830, respectively;
[0770] h) SEQ ID NOs: 798 and 833, respectively;
[0771] i) SEQ ID NOs: 799 and 834, respectively;
[0772] j) SEQ ID NOs: 803 and 838, respectively; and
[0773] k) SEQ ID NOs: 1681 and 815, respectively, wherein the oligonucleotide comprises a modified internucleotide linkage.

[0774] In some embodiments, the sense and antisense strands of an oligonucleotide comprise nucleotides sequences selected from the group consisting of:
[0775] a) SEQ ID NOs: 771 and 806, respectively;
[0776] b) SEQ ID NOs: 780 and 815, respectively;
[0777] c) SEQ ID NOs: 781 and 816, respectively;
[0778] d) SEQ ID NOs: 798 and 833, respectively;
[0779] e) SEQ ID NOs: 799 and 834, respectively;
[0780] f) SEQ ID NOs: 803 and 838, respectively; and
[0781] g) SEQ ID NOs: 1681 and 815, respectively, wherein the oligonucleotide comprises a modified internucleotide linkage.

[0782] Base Modifications

[0783] In some embodiments, an oligonucleotide herein (e.g., a RNAi oligonucleotide) has one or more modified nucleobases. In some embodiments, modified nucleobases (also referred to herein as base analogs) are linked at the 1′ position of a nucleotide sugar moiety. In certain embodiments, a modified nucleobase is a nitrogenous base. In certain embodiments, a modified nucleobase does not contain nitrogen atom. See, e.g., US Patent Application Publication No. 2008/0274462. In some embodiments, a modified nucleotide comprises a universal base. In some embodiments, a modified nucleotide does not contain a nucleobase (abasic).

[0784] In some embodiments, the sense and antisense strands of an oligonucleotide comprise nucleotides sequences selected from the group consisting of:
[0785] a) SEQ ID NOs: 769 and 804, respectively;
[0786] b) SEQ ID NOs: 770 and 805, respectively;
[0787] c) SEQ ID NOs: 771 and 806, respectively;
[0788] d) SEQ ID NOs: 772 and 807, respectively;
[0789] e) SEQ ID NOs: 773 and 808, respectively;
[0790] f) SEQ ID NOs: 774 and 809, respectively;
[0791] g) SEQ ID NOs: 775 and 810, respectively;
[0792] h) SEQ ID NOs: 776 and 811, respectively;
[0793] i) SEQ ID NOs: 777 and 812, respectively;
[0794] j) SEQ ID NOs: 778 and 813, respectively;
[0795] k) SEQ ID NOs: 779 and 814, respectively;
[0796] l) SEQ ID NOs: 780 and 815, respectively;
[0797] m) SEQ ID NOs: 781 and 816, respectively;
[0798] n) SEQ ID NOs: 782 and 817, respectively;
[0799] o) SEQ ID NOs: 783 and 818, respectively;
[0800] p) SEQ ID NOs: 784 and 819, respectively;
[0801] q) SEQ ID NOs: 785 and 820, respectively;
[0802] r) SEQ ID NOs: 786 and 821, respectively;
[0803] s) SEQ ID NOs: 787 and 822, respectively;
[0804] t) SEQ ID NOs: 788 and 823, respectively;
[0805] u) SEQ ID NOs: 789 and 824, respectively;
[0806] v) SEQ ID NOs: 790 and 825, respectively;
[0807] w) SEQ ID NOs: 791 and 826, respectively;
[0808] x) SEQ ID NOs: 792 and 827, respectively;
[0809] y) SEQ ID NOs: 793 and 828, respectively;
[0810] z) SEQ ID NOs: 794 and 829, respectively;
[0811] aa) SEQ ID NOs: 795 and 830, respectively;
[0812] bb) SEQ ID NOs: 796 and 831, respectively;
[0813] cc) SEQ ID NOs: 797 and 832, respectively;
[0814] dd) SEQ ID NOs: 798 and 833, respectively;
[0815] ee) SEQ ID NOs: 799 and 834, respectively;
[0816] ff) SEQ ID NOs: 800 and 835, respectively;
[0817] gg) SEQ ID NOs: 801 and 836, respectively;
[0818] hh) SEQ ID NOs: 802 and 837, respectively;
[0819] ii) SEQ ID NOs: 803 and 838, respectively; and
[0820] jj) SEQ ID NOs: 1681 and 815, respectively, wherein the oligonucleotide comprises one or more modified nucleobases.

[0821] In some embodiments, the sense and antisense strands of an oligonucleotide comprise nucleotides sequences selected from the group consisting of:
[0822] a) SEQ ID NOs: 771 and 806, respectively;
[0823] b) SEQ ID NOs: 776 and 811, respectively;
[0824] c) SEQ ID NOs: 780 and 815, respectively;
[0825] d) SEQ ID NOs: 781 and 816, respectively;
[0826] e) SEQ ID NOs: 782 and 817, respectively;
[0827] f) SEQ ID NOs: 790 and 825, respectively;
[0828] g) SEQ ID NOs: 795 and 830, respectively;
[0829] h) SEQ ID NOs: 798 and 833, respectively;
[0830] i) SEQ ID NOs: 799 and 834, respectively;
[0831] j) SEQ ID NOs: 803 and 838, respectively; and
[0832] k) SEQ ID NOs: 1681 and 815, respectively, wherein the oligonucleotide comprises one or more modified nucleobases.

[0833] In some embodiments, the sense and antisense strands of an oligonucleotide comprise nucleotides sequences selected from the group consisting of:
[0834] a) SEQ ID NOs: 771 and 806, respectively;
[0835] b) SEQ ID NOs: 780 and 815, respectively;
[0836] c) SEQ ID NOs: 781 and 816, respectively;
[0837] d) SEQ ID NOs: 798 and 833, respectively;
[0838] e) SEQ ID NOs: 799 and 834, respectively;
[0839] f) SEQ ID NOs: 803 and 838, respectively;
[0840] g) SEQ ID NOs: 1681 and 815, respectively, wherein the oligonucleotide comprises one or more modified nucleobases.

[0841] In some embodiments, a universal base is a heterocyclic moiety located at the 1′ position of a nucleotide sugar moiety in a modified nucleotide, or the equivalent position in a nucleotide sugar moiety substitution, that, when present in a duplex, can be positioned opposite more than one type of base without substantially altering structure of the duplex. In some embodiments, compared to a reference ss nucleic acid (e.g., an oligonucleotide) that is fully complementary to a target nucleic acid, a ss nucleic acid containing a universal base forms a duplex with the target nucleic acid that has a lower Tₘ than a duplex formed with the complementary nucleic acid. In some embodiments, when compared to a reference ss nucleic acid in which the universal base has been replaced with a base to generate a single mismatch, the ss nucleic acid containing the universal base forms a duplex with the target nucleic acid that has a higher Tₘ than a duplex formed with the nucleic acid comprising the mismatched base.

[0842] Non-limiting examples of universal-binding nucleotides include, but are not limited to, inosine, 1-β-D-ribofuranosyl-5-nitroindole and/or 1-β-D-ribofuranosyl-3-nitropyrrole (see, US Patent Application Publication No. 2007/0254362; Van Aerschot et al. (1995) NUCLEIC ACIDS RES. 23:4363-4370; Loakes et al. (1995) NUCLEIC ACIDS RES. 23:2361-66; and Loakes & Brown (1994) NUCLEIC ACIDS RES. 22:4039-43).

[0843] Targeting Ligands

[0844] In some embodiments, it is desirable to target the oligonucleotide (e.g., a RNAi oligonucleotide) to one or more cells or one or more organs. Such a strategy can help to avoid undesirable effects in other organs or avoid undue loss of the oligonucleotide to cells, tissue, or organs that would not benefit from the oligonucleotide. Accordingly, in some embodiments, the oligonucleotide is modified to facilitate targeting and/or delivery to a particular tissue, cell, or organ (e.g., to facilitate delivery of the oligonucleotide to the CNS). In some embodiments, the oligonucleotide comprises at least one nucleotide (e.g., 1, 2, 3, 4, 5, 6, or more nucleotides) conjugated to one or more targeting ligand(s). In some embodiments, the sense and antisense strands of the oligonucleotide comprise nucleotides sequences selected from the group consisting of:
[0845] a) SEQ ID NOs: 769 and 804, respectively;
[0846] b) SEQ ID NOs: 770 and 805, respectively;
[0847] c) SEQ ID NOs: 771 and 806, respectively;
[0848] d) SEQ ID NOs: 772 and 807, respectively;
[0849] e) SEQ ID NOs: 773 and 808, respectively;
[0850] f) SEQ ID NOs: 774 and 809, respectively;
[0851] g) SEQ ID NOs: 775 and 810, respectively;
[0852] h) SEQ ID NOs: 776 and 811, respectively;
[0853] i) SEQ ID NOs: 777 and 812, respectively;
[0854] j) SEQ ID NOs: 778 and 813, respectively;
[0855] k) SEQ ID NOs: 779 and 814, respectively;
[0856] l) SEQ ID NOs: 780 and 815, respectively;
[0857] m) SEQ ID NOs: 781 and 816, respectively;
[0858] n) SEQ ID NOs: 782 and 817, respectively;
[0859] o) SEQ ID NOs: 783 and 818, respectively;
[0860] p) SEQ ID NOs: 784 and 819, respectively;
[0861] q) SEQ ID NOs: 785 and 820, respectively;
[0862] r) SEQ ID NOs: 786 and 821, respectively;
[0863] s) SEQ ID NOs: 787 and 822, respectively;
[0864] t) SEQ ID NOs: 788 and 823, respectively;
[0865] u) SEQ ID NOs: 789 and 824, respectively;
[0866] v) SEQ ID NOs: 790 and 825, respectively;
[0867] w) SEQ ID NOs: 791 and 826, respectively;
[0868] x) SEQ ID NOs: 792 and 827, respectively;
[0869] y) SEQ ID NOs: 793 and 828, respectively;
[0870] z) SEQ ID NOs: 794 and 829, respectively;
[0871] aa) SEQ ID NOs: 795 and 830, respectively;
[0872] bb) SEQ ID NOs: 796 and 831, respectively;
[0873] cc) SEQ ID NOs: 797 and 832, respectively;
[0874] dd) SEQ ID NOs: 798 and 833, respectively;
[0875] ee) SEQ ID NOs: 799 and 834, respectively;
[0876] ff) SEQ ID NOs: 800 and 835, respectively;
[0877] gg) SEQ ID NOs: 801 and 836, respectively;
[0878] hh) SEQ ID NOs: 802 and 837, respectively; and
[0879] ii) SEQ ID NOs: 803 and 838, respectively, wherein the oligonucleotide comprises a targeting ligand conjugated to at least one nucleotide.

[0880] In some embodiments, the oligonucleotide comprises at least one nucleotide (e.g., 1, 2, 3, 4, 5, 6, or more nucleotides) conjugated to one or more targeting ligand(s). In some embodiments, the sense and antisense strands of the oligonucleotide comprise nucleotides sequences selected from the group consisting of:
[0881] a) SEQ ID NOs: 771 and 806, respectively;
[0882] b) SEQ ID NOs: 776 and 811, respectively;
[0883] c) SEQ ID NOs: 780 and 815, respectively;
[0884] d) SEQ ID NOs: 781 and 816, respectively;
[0885] e) SEQ ID NOs: 782 and 817, respectively;
[0886] f) SEQ ID NOs: 790 and 825, respectively;
[0887] g) SEQ ID NOs: 795 and 830, respectively;
[0888] h) SEQ ID NOs: 798 and 833, respectively;
[0889] i) SEQ ID NOs: 799 and 834, respectively; and
[0890] j) SEQ ID NOs: 803 and 838, respectively, wherein the oligonucleotide comprises a targeting ligand conjugated to at least one nucleotide.

[0891] In some embodiments, the oligonucleotide comprises at least one nucleotide (e.g., 1, 2, 3, 4, 5, 6, or more nucleotides) conjugated to one or more targeting ligand(s). In some embodiments, the sense and antisense strands of the oligonucleotide comprise nucleotides sequences selected from the group consisting of:
[0892] a) SEQ ID NOs: 771 and 806, respectively;
[0893] b) SEQ ID NOs: 780 and 815, respectively;
[0894] c) SEQ ID NOs: 781 and 816, respectively;
[0895] d) SEQ ID NOs: 798 and 833, respectively;
[0896] e) SEQ ID NOs: 799 and 834, respectively; and
[0897] f) SEQ ID NOs: 803 and 838, respectively, wherein the oligonucleotide comprises a targeting ligand conjugated to at least one nucleotide.

[0898] In some embodiments, the targeting ligand comprises a carbohydrate, amino sugar, cholesterol, peptide, polypeptide, or protein or part of a protein (e.g., an antibody or antibody fragment). In some embodiments, the targeting ligand is an aptamer. For example, the targeting ligand may be an RGD peptide that is used to target tumor vasculature or glioma cells, CREKA peptide to target tumor vasculature or stoma, transferring, lactoferrin, or an aptamer to target transferrin receptors expressed on CNS vasculature, or an anti-EGFR antibody to target EGFR on glioma cells. In certain embodiments, the targeting ligand is one or more GalNAc moieties. In some embodiments, the targeting ligand is one or more lipid moieties.

[0899] In some embodiments, 1 or more (e.g., 1, 2, 3, 4, 5, or 6) nucleotides of the oligonucleotide are each conjugated to a separate targeting ligand. In some embodiments, 2 to 4 nucleotides of the oligonucleotide are each conjugated to a separate targeting ligand. In some embodiments, targeting ligands are conjugated to 2 to 4 nucleotides at either ends of the sense or antisense strand (e.g., targeting ligands are conjugated to a 2 to 4 nucleotide overhang or extension on the 5′ or 3′ end of the sense or antisense strand) such that the targeting ligands resemble bristles of a toothbrush and the oligonucleotide resembles a toothbrush. For example, the oligonucleotide may comprise a stem-loop at either the 5′ or 3′ end of the sense strand and 1, 2, 3, or 4 nucleotides of the loop of the stem may be individually conjugated to a targeting ligand. In some embodiments, the oligonucleotide comprises a stem-loop at the 3′ end of the sense strand, wherein the loop of the stem-loop comprises a triL or a tetraL, and wherein the 3 or 4 nucleotides comprising the triL or tetraL, respectfully, are individually conjugated to a targeting ligand. In some embodiments, the oligonucleotide comprises a blunt end at the 3′ end of the oligonucleotide and one or more targeting ligands conjugated to at least one nucleotide. In some embodiments, the oligonucleotide comprises a blunt end at the 3′ end of the oligonucleotide and one or more targeting ligands conjugated to the 5′ terminal nucleotide of the sense strand.

[0900] GalNAc Conjugation

[0901] GalNAc is a high affinity ligand for the asialoglycoprotein receptor (ASGPR), which is primarily expressed on the sinusoidal surface of hepatocyte cells and has a major role in binding, internalizing and subsequent clearing circulating glycoproteins that contain terminal galactose or GalNAc residues (asialoglycoproteins). Conjugation (either indirect or direct) of GalNAc moieties to the oligonucleotides herein can be used to target them to ASGPR expressed on cells. In some embodiments, the oligonucleotide is conjugated to at least one or more GalNAc moieties, wherein the GalNAc moieties target the oligonucleotide to ASGPR expressed on human liver cells (e.g., human hepatocytes). In some embodiments, the GalNAc moiety target the oligonucleotide to the liver.

[0902] In some embodiments, the oligonucleotide is conjugated directly or indirectly to a monovalent GalNAc. In some embodiments, the oligonucleotide is conjugated directly or indirectly to more than one monovalent GalNAc (i.e., is conjugated to 2, 3, or 4 monovalent GalNAc moieties, and is typically conjugated to 3 or 4 monovalent GalNAc moieties). In some embodiments, the oligonucleotide is conjugated to one or more bivalent GalNAc, trivalent GalNAc, or tetravalent GalNAc moieties. In some embodiments, the bivalent, trivalent, or tetravalent GalNAc moiety is conjugated to the oligonucleotide via a branched linker. In some embodiments, the monovalent GalNAc moiety is conjugated to a first nucleotide and the bivalent, trivalent, or tetravalent GalNAc moiety is conjugated to a second nucleotide via a branched linker.

[0903] In some embodiments, 1 or more (e.g., 1, 2, 3, 4, 5, or 6) nucleotides of the oligonucleotide are each conjugated to a GalNAc moiety. In some embodiments, 2 to 4 nucleotides of a tetraL are each conjugated to a separate GalNAc. In some embodiments, 1 to 3 nucleotides of a triL are each conjugated to a separate GalNAc. In some embodiments, targeting ligands are conjugated to 2 to 4 nucleotides at either ends of the sense or antisense strand (e.g., ligands are conjugated to a 2 to 4 nucleotide overhang or extension on the 5′ or 3′ end of the sense or antisense strand) such that the GalNAc moieties resemble bristles of a toothbrush and the oligonucleotide resembles a toothbrush. In some embodiments, GalNAc moieties are conjugated to a nucleotide of the sense strand. For example, 4 GalNAc moieties can be conjugated to nucleotides in the tetraL of the sense strand where each GalNAc moiety is conjugated to 1 nucleotide.

[0904] In some embodiments, the oligonucleotide comprises a tetraL, wherein the tetraL is any combination of adenine (A) and guanine (G) nucleotides. In some embodiments, the tetraL comprises a monovalent GalNAc moiety attached to any one or more guanine (G) nucleotides of the tetraloop via any linker described herein, as depicted below (X=heteroatom):

[chemical structure]

[0905] In some embodiments, the tetraL has a monovalent GalNAc attached to any one or more adenine nucleotides of the tetraloop via any linker described herein, as depicted below (X=heteroatom):

[chemical structure]

[0906] In some embodiments, an oligonucleotide herein (e.g., an RNAi oligonucleotide) comprises a monovalent GalNAc attached to a guanine nucleotide referred to as [ademG-GalNAc] or 2′-aminodiethoxymethanol-Guanine-GalNAc, as depicted below:

[chemical structure]

[0907] In some embodiments, an oligonucleotide herein comprises a monovalent GalNAc attached to an adenine nucleotide, referred to as [ademA-GalNAc] or 2′-aminodiethoxymethanol-Adenine-GalNAc, as depicted below:

[chemical structure]

[0908] An example of such conjugation is shown below for a loop comprising from 5′ to 3′ the nucleotide sequence GAAA (L=linker, X=heteroatom) stem attachment points are shown. Such a loop may be present, for example, at positions 27-30 of the sense strand of any one of the sense strands listed in Tables 4 and 5. In the chemical formula,

[chemical structure]

is used to describe an attachment point to the oligonucleotide strand:

[chemical structure]

[0909] Appropriate methods or chemistry (e.g., click chemistry) can be used to link a targeting ligand to a nucleotide. In some embodiments, a targeting ligand is conjugated to a nucleotide using a click linker. In some embodiments, an acetal-based linker is used to conjugate a targeting ligand to a nucleotide of any one of the oligonucleotides described herein. Acetal-based linkers are disclosed, for example, in Intl. Patent Application Publication No. WO 2016/100401. In some embodiments, the linker is a labile linker. However, in other embodiments, the linker is stable. Examples are shown below for a loop comprising from 5′ to 3′ the nucleotides GAAA, in which GalNAc moieties are attached to 3 or 4 nucleotides of the loop using an acetal linker. Such a loop may be present, for example, at positions 27-30 of the any one of the sense strands listed in Tables 4 and 5. In the chemical formula,

[chemical structure]

is an attachment point to the oligonucleotide strand:

[chemical structure]

[chemical structure]

[0910] As mentioned, various appropriate methods or chemistry synthetic techniques (e.g., click chemistry) can be used to link a targeting ligand to a nucleotide. In some embodiments, a targeting ligand is conjugated to a nucleotide using a click linker. In some embodiments, an acetal-based linker is used to conjugate a targeting ligand to a nucleotide of any one of the oligonucleotides described herein. Acetal-based linkers are disclosed, for example, in Intl. Patent Application Publication No. WO 2016/100401. In some embodiments, the linker is a labile linker. However, in other embodiments, the linker is a stable linker.

[0911] In some embodiments, a duplex extension (e.g., of up to 3, 4, 5, or 6 bp in length) is provided between a targeting ligand (e.g., a GalNAc moiety) and a RNAi oligonucleotide. In some embodiments, the oligonucleotides herein do not have a GalNAc conjugated thereto.

[0912] In some embodiments, the sense and antisense strands of the oligonucleotide comprise nucleotides sequences selected from the group consisting of:
[0913] a) SEQ ID NOs: 769 and 804, respectively;
[0914] b) SEQ ID NOs: 770 and 805, respectively;
[0915] c) SEQ ID NOs: 771 and 806, respectively;
[0916] d) SEQ ID NOs: 772 and 807, respectively;
[0917] e) SEQ ID NOs: 773 and 808, respectively;
[0918] f) SEQ ID NOs: 774 and 809, respectively;
[0919] g) SEQ ID NOs: 775 and 810, respectively;
[0920] h) SEQ ID NOs: 776 and 811, respectively;
[0921] i) SEQ ID NOs: 777 and 812, respectively;
[0922] j) SEQ ID NOs: 778 and 813, respectively;
[0923] k) SEQ ID NOs: 779 and 814, respectively;
[0924] l) SEQ ID NOs: 780 and 815, respectively;
[0925] m) SEQ ID NOs: 781 and 816, respectively;
[0926] n) SEQ ID NOs: 782 and 817, respectively;
[0927] o) SEQ ID NOs: 783 and 818, respectively;
[0928] p) SEQ ID NOs: 784 and 819, respectively;
[0929] q) SEQ ID NOs: 785 and 820, respectively;
[0930] r) SEQ ID NOs: 786 and 821, respectively;
[0931] s) SEQ ID NOs: 787 and 822, respectively;
[0932] t) SEQ ID NOs: 788 and 823, respectively;
[0933] u) SEQ ID NOs: 789 and 824, respectively;
[0934] v) SEQ ID NOs: 790 and 825, respectively;
[0935] w) SEQ ID NOs: 791 and 826, respectively;
[0936] x) SEQ ID NOs: 792 and 827, respectively;
[0937] y) SEQ ID NOs: 793 and 828, respectively;
[0938] z) SEQ ID NOs: 794 and 829, respectively;
[0939] aa) SEQ ID NOs: 795 and 830, respectively;
[0940] bb) SEQ ID NOs: 796 and 831, respectively;
[0941] cc) SEQ ID NOs: 797 and 832, respectively;
[0942] dd) SEQ ID NOs: 798 and 833, respectively;
[0943] ee) SEQ ID NOs: 799 and 834, respectively;
[0944] ff) SEQ ID NOs: 800 and 835, respectively;
[0945] gg) SEQ ID NOs: 801 and 836, respectively;
[0946] hh) SEQ ID NOs: 802 and 837, respectively; and
[0947] ii) SEQ ID NOs: 803 and 838, respectively, wherein the oligonucleotide comprises at least one GalNAc moiety conjugated to a nucleotide.

[0948] In some embodiments, the sense and antisense strands of the oligonucleotide comprise nucleotides sequences selected from the group consisting of:
[0949] a) SEQ ID NOs: 771 and 806, respectively;
[0950] b) SEQ ID NOs: 776 and 811, respectively;
[0951] c) SEQ ID NOs: 780 and 815, respectively;
[0952] d) SEQ ID NOs: 781 and 816, respectively;
[0953] e) SEQ ID NOs: 782 and 817, respectively;
[0954] f) SEQ ID NOs: 790 and 825, respectively;
[0955] g) SEQ ID NOs: 795 and 830, respectively;
[0956] h) SEQ ID NOs: 798 and 833, respectively;
[0957] i) SEQ ID NOs: 799 and 834, respectively; and
[0958] j) SEQ ID NOs: 803 and 838, respectively, wherein the oligonucleotide comprises at least one GalNAc moiety conjugated to a nucleotide.

[0959] In some embodiments, the sense and antisense strands of the oligonucleotide comprise nucleotides sequences selected from the group consisting of:
[0960] a) SEQ ID NOs: 771 and 806, respectively;
[0961] b) SEQ ID NOs: 780 and 815, respectively;
[0962] c) SEQ ID NOs: 781 and 816, respectively;
[0963] d) SEQ ID NOs: 798 and 833, respectively;
[0964] e) SEQ ID NOs: 799 and 834, respectively; and
[0965] f) SEQ ID NOs: 803 and 838, respectively, wherein the oligonucleotide comprises at least one GalNAc moiety conjugated to a nucleotide.

### Lipid Conjugation

[0966] In some embodiments, one or more lipid moieties are conjugated to a 5′ terminal nucleotide of a sense strand. In some embodiments, one or more lipid moieties are conjugated to an adenine nucleotide. In some embodiments, one or more lipid moieties are conjugated to a guanine nucleotide. In some embodiments, one or more lipid moieties are conjugated to a cytosine nucleotide. In some embodiments, one or more lipid moieties are conjugated to a thymine nucleotide. In some embodiments, one or more lipid moieties are conjugated to a uracil nucleotide.

[0967] In some embodiments, the lipid moiety is a hydrocarbon chain. In some embodiments, the hydrocarbon chain is saturated. In some embodiments, the hydrocarbon chain is unsaturated. In some embodiments, the hydrocarbon chain is branched. In some embodiments, the hydrocarbon chain is straight. In some embodiments, the lipid moiety is a C₈-C₃₀ hydrocarbon chain. In some embodiments, the lipid moiety is a C₈:0, C₁₀:0, C₁₁:0, C₁₂:0, C₁₄:0, C₁₆:0, C₁₇:0, C₁₈:0, C₁₈:1, C₁₈:2, C₂₂:5, C₂₂:O, C₂₄:0, C₂₆:0, C₂₂:6, C₂₄:1, diacyl C₁₆:0 or diacyl C₁₈:1. In some embodiments, the lipid moiety is a C₁₆ hydrocarbon chain. In some embodiments, the C₁₆ hydrocarbon chain is represented as:

[chemical structure]

[0968] In some embodiments, the sense strand is 20-22 nucleotides in length and the lipid moiety is a hydrocarbon chain that is conjugated to the 5′ terminal nucleotide of the sense strand. In some embodiments, the sense strand is 20-22 nucleotides in length and the hydrocarbon chain is conjugated to the 5′ terminal nucleotide of the sense strand. In some embodiments, the sense strand is 20-22 nucleotides in length and a C₁₄-C₂₂ hydrocarbon chain is conjugated to the 5′ terminal nucleotide of the sense strand. In some embodiments, the sense strand is 20-22 nucleotides in length and a C₁₆ hydrocarbon chain is conjugated to the 5′ terminal nucleotide of the sense strand. In some embodiments, the sense strand is 20 nucleotides in length and the lipid moiety is conjugated to the 5′ terminal nucleotide of the sense strand. In some embodiments, the sense strand is 20 nucleotides in length and the lipid moiety is a hydrocarbon chain is conjugated to the 5′ terminal nucleotide of the sense strand. In some embodiments, the sense strand is 20 nucleotides in length and a C₁₄-C₂₂ hydrocarbon chain is conjugated to the 5′ terminal nucleotide of the sense strand. In some embodiments, the sense strand is 20 nucleotides in length and a C₁₆ hydrocarbon chain is conjugated to the 5′ terminal nucleotide of the sense strand.

[0969] In some embodiments, the oligonucleotide comprises (i) a sense strand of 20-22 nucleotides in length; (ii) an antisense strand comprising a 3′ overhang sequence of one or more nucleotides in length; (iii) a blunt end comprising the 3′ end of the sense strand; and (iv) a lipid moiety conjugated to the 5′ terminal nucleotide of the sense strand. In some embodiments, the oligonucleotide comprises (i) a sense strand of 20-22 nucleotides in length; (ii) an antisense strand comprising a 3′ overhang sequence of one or more nucleotides in length; (iii) a blunt end comprising the 3′ end of the sense strand; and (iv) a hydrocarbon chain conjugated to the 5′ terminal nucleotide of the sense strand. In some embodiments, the oligonucleotide comprises (i) a sense strand of 20-22 nucleotides in length; (ii) an antisense strand comprising a 3′ overhang sequence of one or more nucleotides in length; (iii) a blunt end comprising the 3′ end of the sense strand; and (iv) a C₁₄-C₂₂ hydrocarbon chain conjugated to the 5′ terminal nucleotide of the sense strand. In some embodiments, the oligonucleotide comprises (i) a sense strand of 20-22 nucleotides in length; (ii) an antisense strand comprising a 3′ overhang sequence of one or more nucleotides in length; (iii) a blunt end comprising the 3′ end of the sense strand; and (iv) a C₁₆ hydrocarbon chain conjugated to the 5′ terminal nucleotide of the sense strand.

[0970] In some embodiments, the oligonucleotide comprises (i) a sense strand of 20 nucleotides in length; (ii) an antisense strand of 22 nucleotides in length comprising a 3′ overhang sequence of two nucleotides in length; (iii) a blunt end comprising the 3′ end of the sense strand; and (iv) a lipid moiety conjugated to the 5′ terminal nucleotide of the sense strand. In some embodiments, the oligonucleotide comprises (i) a sense strand of 20 nucleotides in length; (ii) an antisense strand of 22 nucleotides in length comprising a 3′ overhang sequence of two nucleotides in length; (iii) a blunt end comprising the 3′ end of the sense strand; and (iv) a hydrocarbon chain conjugated to the 5′ terminal nucleotide of the sense strand. In some embodiments, the oligonucleotide comprises (i) a sense strand of 20 nucleotides in length; (ii) an antisense strand of 22 nucleotides in length comprising a 3′ overhang sequence of two nucleotides in length; (iii) a blunt end comprising the 3′ end of the sense strand; and (iv) a C₁₄-C₂₂ hydrocarbon chain conjugated to the 5′ terminal nucleotide of the sense strand. In some embodiments, the oligonucleotide comprises (i) a sense strand of 20 nucleotides in length; (ii) an antisense strand of 22 nucleotides in length comprising a 3′ overhang sequence of two nucleotides in length; (iii) a blunt end comprising the 3′ end of the sense strand; and (iv) a C₁₆ hydrocarbon chain conjugated to the 5′ terminal nucleotide of the sense strand.

[0971] In some embodiments, the oligonucleotide comprises (i) an antisense strand of 19-30 nucleotides comprising a region of complementarity to a MAPT mRNA target sequence selected from SEQ ID NOs: 1125, 1127, 1130, 1019, 1031, 1044, 1064, 1065, 1067, 1083, 915, 1095, 1096, 1102, 1110, 923, 925, 1025, 1039, 1049, 1061, 1070, 1072, 1075, 1081, 1108, 1111, 1114, 1119, 1120, 1121, 1122, 1123, and 1124; (ii) a sense strand of 19-25 nucleotides that forms a duplex region with the antisense strand; and (iii) a lipid moiety conjugated to the 5′ terminal nucleotide of the sense strand. In some embodiments, the oligonucleotide comprises (i) an antisense strand of 19-30 nucleotides comprising a region of complementarity to a MAPT mRNA target sequence selected from SEQ ID NOs: 1061, 1108, 1119, 1120, 1124, 1130, 1065, 1095, 1096, and 1102; (ii) a sense strand of 19-25 nucleotides that forms a duplex region with the antisense strand; and (iii) a lipid moiety conjugated to the 5′ terminal nucleotide of the sense strand. In some embodiments, the oligonucleotide comprises (i) an antisense strand of 19-30 nucleotides comprising a region of complementarity to a MAPT mRNA target sequence selected from SEQ ID NOs: 1130, 1095, 1096, 1119, 1120, and 1124; (ii) a sense strand of 19-25 nucleotides that forms a duplex region with the antisense strand; and (iii) a lipid moiety conjugated to the 5′ terminal nucleotide of the sense strand.

[0972] In some embodiments, the oligonucleotide comprises (i) an antisense strand of 19-30 nucleotides comprising a region of complementarity to a MAPT mRNA target sequence selected from SEQ ID NOs: 1125, 1127, 1130, 1019, 1031, 1044, 1064, 1065, 1067, 1083, 915, 1095, 1096, 1102, 1110, 923, 925, 1025, 1039, 1049, 1061, 1070, 1072, 1075, 1081, 1108, 1111, 1114, 1119, 1120, 1121, 1122, 1123, and 1124; (ii) a sense strand of 19-25 nucleotides that forms a duplex region with the antisense strand; and (iii) a hydrocarbon chain conjugated to the 5′ terminal nucleotide of the sense strand. In some embodiments, the oligonucleotide comprises (i) an antisense strand of 19-30 nucleotides comprising a region of complementarity to a MAPT mRNA target sequence selected from SEQ ID NOs: 1061, 1108, 1119, 1120, 1124, 1130, 1065, 1095, 1096, and 1102; (ii) a sense strand of 19-25 nucleotides that forms a duplex region with the antisense strand; and (iii) a hydrocarbon chain conjugated to the 5′ terminal nucleotide of the sense strand. In some embodiments, the oligonucleotide comprises (i) an antisense strand of 19-30 nucleotides comprising a region of complementarity to a MAPT mRNA target sequence selected from SEQ ID NOs: 1130, 1095, 1096, 1119, 1120, and 1124; (ii) a sense strand of 19-25 nucleotides that forms a duplex region with the antisense strand; and (iii) a hydrocarbon chain conjugated to the 5′ terminal nucleotide of the sense strand.

[0973] In some embodiments, the oligonucleotide comprises (i) an antisense strand of 19-30 nucleotides comprising a region of complementarity to a MAPT mRNA target sequence selected from SEQ ID NOs: 1125, 1127, 1130, 1019, 1031, 1044, 1064, 1065, 1067, 1083, 915, 1095, 1096, 1102, 1110, 923, 925, 1025, 1039, 1049, 1061, 1070, 1072, 1075, 1081, 1108, 1111, 1114, 1119, 1120, 1121, 1122, 1123, and 1124; (ii) a sense strand of 19-25 nucleotides that forms a duplex region with the antisense strand; and (iii) a C₁₄-C₂₂ hydrocarbon chain conjugated to the 5′ terminal nucleotide of the sense strand. In some embodiments, the oligonucleotide comprises (i) an antisense strand of 19-30 nucleotides comprising a region of complementarity to a MAPT mRNA target sequence selected from SEQ ID NOs: 1061, 1108, 1119, 1120, 1124, 1130, 1065, 1095, 1096, and 1102; (ii) a sense strand of 19-25 nucleotides that forms a duplex region with the antisense strand; and (iii) a C₁₄-C₂₂ hydrocarbon chain conjugated to the 5′ terminal nucleotide of the sense strand. In some embodiments, the oligonucleotide comprises (i) an antisense strand of 19-30 nucleotides comprising a region of complementarity to a MAPT mRNA target sequence selected from SEQ ID NOs: 1130, 1095, 1096, 1119, 1120, and 1124; (ii) a sense strand of 19-25 nucleotides that forms a duplex region with the antisense strand; and (iii) a C₁₄-C₂₂ hydrocarbon chain conjugated to the 5′ terminal nucleotide of the sense strand.

[0974] In some embodiments, the oligonucleotide comprises (i) an antisense strand of 19-30 nucleotides comprising a region of complementarity to a MAPT mRNA target sequence selected from SEQ ID NOs: 1125, 1127, 1130, 1019, 1031, 1044, 1064, 1065, 1067, 1083, 915, 1095, 1096, 1102, 1110, 923, 925, 1025, 1039, 1049, 1061, 1070, 1072, 1075, 1081, 1108, 1111, 1114, 1119, 1120, 1121, 1122, 1123, and 1124; (ii) a sense strand of 19-25 nucleotides that forms a duplex region with the antisense strand; and (iii) a C₁₆ hydrocarbon chain conjugated to the 5′ terminal nucleotide of the sense strand. In some embodiments, the oligonucleotide comprises (i) an antisense strand of 19-30 nucleotides comprising a region of complementarity to a MAPT mRNA target sequence selected from SEQ ID NOs: 1061, 1108, 1119, 1120, 1124, 1130, 1065, 1095, 1096, and 1102; (ii) a sense strand of 19-25 nucleotides that forms a duplex region with the antisense strand; and (iii) a C₁₆ hydrocarbon chain conjugated to the 5′ terminal nucleotide of the sense strand. In some embodiments, the oligonucleotide comprises (i) an antisense strand of 19-30 nucleotides comprising a region of complementarity to a MAPT mRNA target sequence selected from SEQ ID NOs: 1130, 1095, 1096, 1119, 1120, and 1124; (ii) a sense strand of 19-25 nucleotides that forms a duplex region with the antisense strand; and (iii) a C₁₆ hydrocarbon chain conjugated to the 5′ terminal nucleotide of the sense strand.

[0975] In some embodiments, the oligonucleotide comprises a sense strand comprising the nucleotide sequence of SEQ ID NO: 1681 and an antisense strand comprising the nucleotide sequence of SEQ ID NO: 815, wherein the sense strand comprises a lipid moiety conjugated to the 5′ terminal nucleotide of the sense strand. In some embodiments, the oligonucleotide comprises a sense strand comprising the nucleotide sequence of SEQ ID NO: 1681 and an antisense strand comprising the nucleotide sequence of SEQ ID NO: 815, wherein the sense strand comprises a hydrocarbon chain conjugated to the 5′ terminal nucleotide of the sense strand. In some embodiments, the oligonucleotide comprises a sense strand comprising the nucleotide sequence of SEQ ID NO: 1681 and an antisense strand comprising the nucleotide sequence of SEQ ID NO: 815, wherein the sense strand comprises a C₁₄-C₂₂ hydrocarbon chain conjugated to the 5′ terminal nucleotide of the sense strand. In some embodiments, the oligonucleotide comprises a sense strand comprising the nucleotide sequence of SEQ ID NO: 1681 and an antisense strand comprising the nucleotide sequence of SEQ ID NO: 815, wherein the sense strand comprises a C₁₆ hydrocarbon chain conjugated to the 5′ terminal nucleotide of the sense strand.

[0976] Exemplary MAPT-Targeting RNAi Oligonucleotides

[0977] In some embodiments, the MAPT-targeting RNAi oligonucleotide for reducing MAPT gene expression provided by the current disclosure comprises a sense strand and an antisense strand, wherein all nucleotides comprising the sense strand and the antisense strand are modified, wherein the antisense strand comprises a region of complementarity to a MAPT mRNA target sequence of any one of SEQ ID NOs: 912-1295, and wherein the region of complementarity is at least 15 contiguous nucleotides in length. In some embodiments, the 5′ terminal nucleotide of the antisense strand comprises 4′-O-monomethylphosphonate-2′-O-methyluridine [MePhosphonate-40-mU], as described herein. In some embodiments, the 5′ terminal nucleotide of the antisense strand comprises a phosphorothioate linkage. In some embodiments, the antisense strand and the sense strand comprise one or more 2′-F- and 2′-OMe-modified nucleotides and at least one phosphorothioate linkage. In some embodiments, the antisense strand comprises 4 phosphorothioate linkages and the sense strand comprises 1 phosphorothioate linkage. In some embodiments, the antisense strand comprises 5 phosphorothioate linkages and the sense strand comprises 1 phosphorothioate linkage.

[0978] In some embodiments, an oligonucleotide (e.g., a RNAi oligonucleotide) comprises a sense strand having a sequence of any one of SEQ ID NOs: 912-1295 and an antisense strand comprising a complementary sequence selected from SEQ ID NOs: 1296-1679.

[0979] In some embodiments, the oligonucleotide comprises a sense strand having a sequence of any one of SEQ ID NOs: 1-384 and an antisense strand comprising a complementary sequence selected from SEQ ID NOs: 385-768.

[0980] In some embodiments, the oligonucleotide comprises a sense strand having a sequence of any one of SEQ ID NOs: 769-803 and an antisense strand comprising a complementary sequence selected from SEQ ID NOs: 804-838.

[0981] In some embodiments, the oligonucleotide comprises a sense strand having a sequence of any one of SEQ ID NOs: 769-803 and 1681, and an antisense strand comprising a complementary sequence selected from SEQ ID NOs: 804-838.

[0982] In some embodiments, the oligonucleotide comprises a sense strand having a sequence of any one of SEQ ID NOs: 839-873 and an antisense strand comprising a complementary sequence selected from SEQ ID NOs: 874-908.

[0983] In some embodiments, the oligonucleotide comprises a sense strand having a sequence of any one of SEQ ID NOs: 839-873 and 1681, and an antisense strand comprising a complementary sequence selected from SEQ ID NOs: 874-908.

[0984] In some embodiments, an oligonucleotide (e.g., a RNAi oligonucleotide) for reducing MAPT gene expression comprises:
[0985] a sense strand of 36 nucleotides comprising a 2′-F-modified nucleotide at positions 3, 5, 8, 10, 12, 13, 15, and 17; a 2′-OMe-modified nucleotide at positions 1, 2, 4, 6, 7, 9, 11, 14, 16, 18-27, and 31-36; a GalNAc-conjugated nucleotide at position 28, 29, and 30; and a phosphorothioate linkage between positions 1 and 2; and
[0986] an antisense strand of 22 nucleotides comprising a 2′-F-modified nucleotide at positions 2, 3, 4, 5, 7, 10, 14, 16, and 19; a 2′-OMe-modified nucleotide at positions 1, 6, 8, 9, 11, 12, 13, 15, 17, 18, and 20-22; a phosphorothioate linkage between positions 1 and 2, positions 2 and 3, positions 20 and 21, and positions 21 and 22; and a 5′ terminal nucleotide at position 1 comprising a 4′-phosphate analog, optionally wherein the 5′ terminal nucleotide comprises 4′-O-monomethylphosphonate-2′-O-methyluridine [MePhosphonate-4O-mU]; wherein positions 1-20 of the antisense strand form a duplex region with positions 1-20 of the sense strand, wherein positions 21-36 of the sense strand form a stem-loop, wherein positions 27-30 form the loop of the stem-loop, optionally wherein positions 27-30 comprise a tetraL, wherein positions 21 and 22 of the antisense strand comprise an overhang, and wherein the sense strand and antisense strands comprise nucleotide sequences selected from the group consisting of:
[0987] a) SEQ ID NOs: 769 and 804, respectively;
[0988] b) SEQ ID NOs: 770 and 805, respectively;
[0989] c) SEQ ID NOs: 771 and 806, respectively;
[0990] d) SEQ ID NOs: 772 and 807, respectively;
[0991] e) SEQ ID NOs: 773 and 808, respectively;
[0992] f) SEQ ID NOs: 774 and 809, respectively;
[0993] g) SEQ ID NOs: 775 and 810, respectively;
[0994] h) SEQ ID NOs: 776 and 811, respectively;
[0995] i) SEQ ID NOs: 777 and 812, respectively;
[0996] j) SEQ ID NOs: 778 and 813, respectively;
[0997] k) SEQ ID NOs: 779 and 814, respectively;
[0998] l) SEQ ID NOs: 780 and 815, respectively;
[0999] m) SEQ ID NOs: 781 and 816, respectively;
[1000] n) SEQ ID NOs: 782 and 817, respectively;
[1001] o) SEQ ID NOs: 783 and 818, respectively;
[1002] p) SEQ ID NOs: 784 and 819, respectively;
[1003] q) SEQ ID NOs: 785 and 820, respectively;
[1004] r) SEQ ID NOs: 786 and 821, respectively;
[1005] s) SEQ ID NOs: 787 and 822, respectively;
[1006] t) SEQ ID NOs: 788 and 823, respectively;
[1007] u) SEQ ID NOs: 789 and 824, respectively;
[1008] v) SEQ ID NOs: 790 and 825, respectively;
[1009] w) SEQ ID NOs: 791 and 826, respectively;
[1010] x) SEQ ID NOs: 792 and 827, respectively;
[1011] y) SEQ ID NOs: 793 and 828, respectively;
[1012] z) SEQ ID NOs: 794 and 829, respectively;
[1013] aa) SEQ ID NOs: 795 and 830, respectively;
[1014] bb) SEQ ID NOs: 796 and 831, respectively;
[1015] cc) SEQ ID NOs: 797 and 832, respectively;
[1016] dd) SEQ ID NOs: 798 and 833, respectively;
[1017] ee) SEQ ID NOs: 799 and 834, respectively;
[1018] ff) SEQ ID NOs: 800 and 835, respectively;
[1019] gg) SEQ ID NOs: 801 and 836, respectively;
[1020] hh) SEQ ID NOs: 802 and 837, respectively; and
[1021] ii) SEQ ID NOs: 803 and 838, respectively.

[1022] In some embodiments, an oligonucleotide (e.g., and RNAi oligonucleotide) for reducing MAPT gene expression comprises:
[1023] a sense strand of 36 nucleotides comprising a 2′-F-modified nucleotide at positions 3, 5, 8, 10, 12, 13, 15, and 17; a 2′-OMe-modified nucleotide at positions 1, 2, 4, 6, 7, 9, 11, 14, 16, 18-27, and 31-36; a GalNAc-conjugated nucleotide at position 28, 29, and 30; and a phosphorothioate linkage between positions 1 and 2; and
[1024] an antisense strand of 22 nucleotides comprising a 2′-F-modified nucleotide at positions 2, 3, 4, 5, 7, 10, 14, 16, and 19; a 2′-OMe-modified nucleotide at positions 1, 6, 8, 9, 11, 12, 13, 15, 17, 18, and 20-22; a phosphorothioate linkage between positions 1 and 2, positions 2 and 3, positions 20 and 21, and positions 21 and 22; and a 5′ terminal nucleotide at position 1 comprising a 4′-phosphate analog, optionally wherein the 5′ terminal nucleotide comprises 4′-O-monomethylphosphonate-2′-O-methyluridine [MePhosphonate-4O-mU]; wherein positions 1-20 of the antisense strand form a duplex region with positions 1-20 of the sense strand, wherein positions 21-36 of the sense strand form a stem-loop, wherein positions 27-30 form the loop of the stem-loop, optionally wherein positions 27-30 comprise a tetraloop, wherein positions 21 and 22 of the antisense strand comprise an overhang, and wherein the sense strand and antisense strands comprise nucleotide sequences selected from the group consisting of:
[1025] a) SEQ ID NOs: 771 and 806, respectively;
[1026] b) SEQ ID NOs: 776 and 811, respectively;
[1027] c) SEQ ID NOs: 780 and 815, respectively;
[1028] d) SEQ ID NOs: 781 and 816, respectively;
[1029] e) SEQ ID NOs: 782 and 817, respectively;
[1030] f) SEQ ID NOs: 790 and 825, respectively;
[1031] g) SEQ ID NOs: 795 and 830, respectively;
[1032] h) SEQ ID NOs: 798 and 833, respectively;
[1033] i) SEQ ID NOs: 799 and 834, respectively; and
[1034] j) SEQ ID NOs: 803 and 838, respectively.

[1035] In some embodiments, an oligonucleotide (e.g., a RNAi oligonucleotide) for reducing MAPT gene expression comprises:
[1036] a sense strand of 36 nucleotides comprising a 2′-F-modified nucleotide at positions 3, 5, 8, 10, 12, 13, 15, and 17; a 2′-OMe-modified nucleotide at positions 1, 2, 4, 6, 7, 9, 11, 14, 16, 18-27, and 31-36; a GalNAc-conjugated nucleotide at position 28, 29, and 30; and a phosphorothioate linkage between positions 1 and 2; and
[1037] an antisense strand of 22 nucleotides comprising a 2′-F-modified nucleotide at positions 2, 3, 4, 5, 7, 10, 14, 16, and 19; a 2′-OMe-modified nucleotide at positions 1, 6, 8, 9, 11, 12, 13, 15, 17, 18, and 20-22; a phosphorothioate linkage between positions 1 and 2, positions 2 and 3, positions 20 and 21, and positions 21 and 22; and a 5′ terminal nucleotide at position 1 comprising a 4′-phosphate analog, optionally wherein the 5′ terminal nucleotide comprises 4′-O-monomethylphosphonate-2′-O-methyluridine [MePhosphonate-4O-mU]; wherein positions 1-20 of the antisense strand form a duplex region with positions 1-20 of the sense strand, wherein positions 21-36 of the sense strand form a stem-loop, wherein positions 27-30 form the loop of the stem-loop, optionally wherein positions 27-30 comprise a tetraloop, wherein positions 21 and 22 of the antisense strand comprise an overhang, and wherein the sense strand and antisense strands comprise nucleotide sequences selected from the group consisting of:
[1038] a) SEQ ID NOs: 771 and 806, respectively;
[1039] b) SEQ ID NOs: 780 and 815, respectively;
[1040] c) SEQ ID NOs: 781 and 816, respectively;
[1041] d) SEQ ID NOs: 798 and 833, respectively;
[1042] e) SEQ ID NOs: 799 and 834, respectively; and
[1043] f) SEQ ID NOs: 803 and 838, respectively.

[1044] In some embodiments, an oligonucleotide (e.g., a RNAi oligonucleotide) for reducing MAPT gene expression comprises:
[1045] a sense strand of 20 nucleotides comprising a 2′-F-modified nucleotide at positions 3, 5, 8, 10, 12, 13, 15, and 17; a 2′-OMe-modified nucleotide at positions 2, 4, 6, 7, 9, 11, 14, 16, and 18-20; a C₁₆ hydrocarbon chain conjugated to a nucleotide at position 1; and a phosphorothioate linkage between positions 1 and 2, between positions 18 and 19, and between positions 19 and 20; and
[1046] an antisense strand of 22 nucleotides comprising a 2′-F-modified nucleotide at positions 2, 3, 4, 5, 7, 10, 14, 16, and 19; a 2′-OMe modified-nucleotide at positions 1, 6, 8, 9, 11, 12, 13, 15, 17, 18, and 20-22; a phosphorothioate linkage between positions 1 and 2, positions 2 and 3, positions 20 and 21, and positions 21 and 22; and a 5′ terminal nucleotide at position 1 comprising a 4′-phosphate analog, optionally wherein the 5′ terminal nucleotide comprises 4′-O-monomethylphosphonate-2′-O-methyluridine [MePhosphonate-4O-mU]; wherein positions 1-20 of the antisense strand form a duplex region with positions 1-20 of the sense strand, wherein positions 21 and 22 of the antisense strand comprise an overhang, and wherein the sense strand and antisense strands comprise nucleotide sequences of SEQ ID NOs: 1681 and 815, respectively.

[1047] In some embodiments, an oligonucleotide for reducing MAPT gene expression comprises a sense strand comprising the nucleotide sequence as set forth in SEQ ID NO: 771 and an antisense strand comprising the nucleotide sequence as set forth in SEQ ID NO: 806. In some embodiments, an oligonucleotide for reducing MAPT gene expression comprises a sense strand comprising the nucleotide sequence as set forth in SEQ ID NO: 780 and an antisense strand comprising the nucleotide sequence as set forth in SEQ ID NO: 815. In some embodiments, an oligonucleotide for reducing MAPT gene expression comprises a sense strand comprising the nucleotide sequence as set forth in SEQ ID NO: 781 and an antisense strand comprising the nucleotide sequence as set forth in SEQ ID NO: 816. In some embodiments, an oligonucleotide for reducing MAPT gene expression comprises a sense strand comprising the nucleotide sequence as set forth in SEQ ID NO: 798 and an antisense strand comprising the nucleotide sequence as set forth in SEQ ID NO: 833. In some embodiments, an oligonucleotide for reducing MAPT gene expression comprises a sense strand comprising the nucleotide sequence as set forth in SEQ ID NO: 799 and an antisense strand comprising the nucleotide sequence as set forth in SEQ ID NO: 834. In some embodiments, an oligonucleotide for reducing MAPT gene expression comprises a sense strand comprising the nucleotide sequence as set forth in SEQ ID NO: 803 and an antisense strand comprising the nucleotide sequence as set forth in SEQ ID NO: 838. In some embodiments, an oligonucleotide for reducing MAPT gene expression comprises a sense strand comprising the nucleotide sequence as set forth in SEQ ID NO: 1681 and an antisense strand comprising the nucleotide sequence as set forth in SEQ ID NO: 815.

[1048] In some embodiments, an oligonucleotide (e.g., a RNAi oligonucleotide) for reducing MAPT gene expression comprises (i) an antisense strand of 19-30 nucleotides in length, wherein the antisense strand comprises a nucleotide sequence comprising a region of complementarity to a MAPT mRNA target sequence, wherein the region of complementarity is set forth in SEQ ID NO: 1514; and (ii) a sense strand of 19-50 nucleotides in length comprising a region of complementarity to the antisense strand, wherein the antisense and sense strands are separate strands that form an asymmetric duplex region having an overhang of 1-4 nucleotides at the 3′ terminus of the antisense strand.

[1049] In some embodiments, an oligonucleotide (e.g., a RNAi oligonucleotide) for reducing MAPT gene expression comprises (i) an antisense strand of 19-30 nucleotides in length, wherein the antisense strand comprises a nucleotide sequence comprising a region of complementarity to a MAPT mRNA target sequence, wherein the region of complementarity is set forth in SEQ ID NO: 1479; and (ii) a sense strand of 19-50 nucleotides in length comprising a region of complementarity to the antisense strand, wherein the antisense and sense strands are separate strands that form an asymmetric duplex region having an overhang of 1-4 nucleotides at the 3′ terminus of the antisense strand.

[1050] In some embodiments, an oligonucleotide for reducing MAPT gene expression comprises (i) an antisense strand of 19-30 nucleotides in length, wherein the antisense strand comprises a nucleotide sequence comprising a region of complementarity to a MAPT mRNA target sequence, wherein the region of complementarity is set forth in SEQ ID NO: 1480; and (ii) a sense strand of 19-50 nucleotides in length comprising a region of complementarity to the antisense strand, wherein the antisense and sense strands are separate strands that form an asymmetric duplex region having an overhang of 1-4 nucleotides at the 3′ terminus of the antisense strand.

[1051] In some embodiments, a MAPT-targeting RNAi oligonucleotide for reducing MAPT gene expression comprises (i) an antisense strand of 19-30 nucleotides in length, wherein the antisense strand comprises a nucleotide sequence comprising a region of complementarity to a MAPT mRNA target sequence, wherein the region of complementarity is set forth in SEQ ID NO: 1503; and (ii) a sense strand of 19-50 nucleotides in length comprising a region of complementarity to the antisense strand, wherein the antisense and sense strands are separate strands that form an asymmetric duplex region having an overhang of 1-4 nucleotides at the 3′ terminus of the antisense strand.

[1052] In some embodiments an oligonucleotide (e.g., a RNAi oligonucleotide) for reducing MAPT gene expression comprises (i) an antisense strand of 19-30 nucleotides in length, wherein the antisense strand comprises a nucleotide sequence comprising a region of complementarity to a MAPT mRNA target sequence, wherein the region of complementarity is set forth in SEQ ID NO: 1504; and (ii) a sense strand of 19-50 nucleotides in length comprising a region of complementarity to the antisense strand, wherein the antisense and sense strands are separate strands that form an asymmetric duplex region having an overhang of 1-4 nucleotides at the 3′ terminus of the antisense strand.

[1053] In some embodiments, an oligonucleotide (e.g., a RNAi oligonucleotide) for reducing MAPT gene expression comprises (i) an antisense strand of 19-30 nucleotides in length, wherein the antisense strand comprises a nucleotide sequence comprising a region of complementarity to a MAPT mRNA target sequence, wherein the region of complementarity is set forth in SEQ ID NO: 1508; and (ii) a sense strand of 19-50 nucleotides in length comprising a region of complementarity to the antisense strand, wherein the antisense and sense strands are separate strands that form an asymmetric duplex region having an overhang of 1-4 nucleotides at the 3′ terminus of the antisense strand.

[1054] In some embodiments, an oligonucleotide (e.g., a RNAi oligonucleotide) for reducing MAPT gene expression comprises (i) an antisense strand of 19-30 nucleotides in length, wherein the antisense strand comprises a nucleotide sequence comprising a region of complementarity to a MAPT mRNA target sequence, wherein the region of complementarity is set forth in SEQ ID NO: 1514; and (ii) a sense strand of 19-50 nucleotides in length comprising a region of complementarity to the antisense strand and a stem-loop at the 3′ terminus, wherein the stem-loop is set forth as S1-L-S2, wherein S1 is complementary to S2 and wherein L forms a loop between S1 and S2 of 3 to 5 nucleotides in length, wherein the antisense and sense strands are separate strands that form an asymmetric duplex region having an overhang of 1-4 nucleotides at the 3′ terminus of the antisense strand.

[1055] In some embodiments, an oligonucleotide (e.g., a RNAi oligonucleotide) for reducing MAPT gene expression comprises (i) an antisense strand of 19-30 nucleotides in length, wherein the antisense strand comprises a nucleotide sequence comprising a region of complementarity to a MAPT mRNA target sequence, wherein the region of complementarity is set forth in SEQ ID NO: 1479; and (ii) a sense strand of 19-50 nucleotides in length comprising a region of complementarity to the antisense strand and a stem-loop at the 3′ terminus, wherein the stem-loop is set forth as 51-L-S2, wherein S1 is complementary to S2 and wherein L forms a loop between S1 and S2 of 3 to 5 nucleotides in length, wherein the antisense and sense strands are separate strands that form an asymmetric duplex region having an overhang of 1-4 nucleotides at the 3′ terminus of the antisense strand.

[1056] In some embodiments, an oligonucleotide (e.g., a RNAi oligonucleotide) for reducing MAPT gene expression comprises (i) an antisense strand of 19-30 nucleotides in length, wherein the antisense strand comprises a nucleotide sequence comprising a region of complementarity to a MAPT mRNA target sequence, wherein the region of complementarity is set forth in SEQ ID NO: 1480; and (ii) a sense strand of 19-50 nucleotides in length comprising a region of complementarity to the antisense strand and a stem-loop at the 3′ terminus, wherein the stem-loop is set forth as S1-L-S2, wherein S1 is complementary to S2 and wherein L forms a loop between S1 and S2 of 3 to 5 nucleotides in length, wherein the antisense and sense strands are separate strands that form an asymmetric duplex region having an overhang of 1-4 nucleotides at the 3′ terminus of the antisense strand.

[1057] In some embodiments, an oligonucleotide (e.g., a RNAi oligonucleotide) for reducing MAPT gene expression comprises (i) an antisense strand of 19-30 nucleotides in length, wherein the antisense strand comprises a nucleotide sequence comprising a region of complementarity to a MAPT mRNA target sequence, wherein the region of complementarity is set forth in SEQ ID NO: 1503; and (ii) a sense strand of 19-50 nucleotides in length comprising a region of complementarity to the antisense strand and a stem-loop at the 3′ terminus, wherein the stem-loop is set forth as S1-L-S2, wherein S1 is complementary to S2 and wherein L forms a loop between S1 and S2 of 3 to 5 nucleotides in length, wherein the antisense and sense strands are separate strands that form an asymmetric duplex region having an overhang of 1-4 nucleotides at the 3′ terminus of the antisense strand.

[1058] In some embodiments, an oligonucleotide (e.g., a RNAi oligonucleotide) for reducing MAPT gene expression comprises (i) an antisense strand of 19-30 nucleotides in length, wherein the antisense strand comprises a nucleotide sequence comprising a region of complementarity to a MAPT mRNA target sequence, wherein the region of complementarity is set forth in SEQ ID NO: 1504; and (ii) a sense strand of 19-50 nucleotides in length comprising a region of complementarity to the antisense strand and a stem-loop at the 3′ terminus, wherein the stem-loop is set forth as 51-L-S2, wherein S1 is complementary to S2 and wherein L forms a loop between S1 and S2 of 3 to 5 nucleotides in length, wherein the antisense and sense strands are separate strands that form an asymmetric duplex region having an overhang of 1-4 nucleotides at the 3′ terminus of the antisense strand.

[1059] In some embodiments, an oligonucleotide (e.g., a RNAi oligonucleotide) for reducing MAPT gene expression comprises (i) an antisense strand of 19-30 nucleotides in length, wherein the antisense strand comprises a nucleotide sequence comprising a region of complementarity to a MAPT mRNA target sequence, wherein the region of complementarity is set forth in SEQ ID NO: 1508; and (ii) a sense strand of 19-50 nucleotides in length comprising a region of complementarity to the antisense strand and a stem-loop at the 3′ terminus, wherein the stem-loop is set forth as S1-L-S2, wherein S1 is complementary to S2 and wherein L forms a loop between S1 and S2 of 3 to 5 nucleotides in length, wherein the antisense and sense strands are separate strands that form an asymmetric duplex region having an overhang of 1-4 nucleotides at the 3′ terminus of the antisense strand.

[1060] In some embodiments, an oligonucleotide (e.g., a RNAi oligonucleotide) for reducing MAPT gene expression comprises (i) an antisense strand of 19-30 nucleotides in length, wherein the antisense strand comprises a nucleotide sequence comprising a region of complementarity to a MAPT mRNA target sequence, wherein the region of complementarity is set forth in SEQ ID NO: 1479; and (ii) a sense strand of 19-25 nucleotides in length comprising a region of complementarity to the antisense strand, wherein the oligonucleotide comprises a blunt end comprising the 3′ end of the sense strand, wherein the antisense and sense strands are separate strands that form an asymmetric duplex region having an overhang of 1-4 nucleotides at the 3′ terminus of the antisense strand.

[1061] In some embodiments, an oligonucleotide (e.g., a RNAi oligonucleotide) for reducing MAPT gene expression comprises (i) an antisense strand of 19-30 nucleotides in length, wherein the antisense strand comprises a nucleotide sequence comprising a region of complementarity to a MAPT mRNA target sequence, wherein the region of complementarity is set forth in SEQ ID NO: 1514; and (ii) a sense strand of 19-50 nucleotides in length comprising a region of complementarity to the antisense strand, wherein the region of complementarity to the antisense strand is set forth in SEQ ID NO: 1130, wherein the antisense and sense strands are separate strands that form an asymmetric duplex region having an overhang of 1-4 nucleotides at the 3′ terminus of the antisense strand.

[1062] In some embodiments, an oligonucleotide (e.g., a RNAi oligonucleotide) for reducing MAPT gene expression comprises (i) an antisense strand of 19-30 nucleotides in length, wherein the antisense strand comprises a nucleotide sequence comprising a region of complementarity to a MAPT mRNA target sequence, wherein the region of complementarity is set forth in SEQ ID NO: 1479; and (ii) a sense strand of 19-50 nucleotides in length comprising a region of complementarity to the antisense strand, wherein the region of complementarity to the antisense strand is set forth in SEQ ID NO: 1095, wherein the antisense and sense strands are separate strands that form an asymmetric duplex region having an overhang of 1-4 nucleotides at the 3′ terminus of the antisense strand.

[1063] In some embodiments, an oligonucleotide (e.g., a RNAi oligonucleotide) for reducing MAPT gene expression comprises (i) an antisense strand of 19-30 nucleotides in length, wherein the antisense strand comprises a nucleotide sequence comprising a region of complementarity to a MAPT mRNA target sequence, wherein the region of complementarity is set forth in SEQ ID NO: 1480; and (ii) a sense strand of 19-50 nucleotides in length comprising a region of complementarity to the antisense strand, wherein the region of complementarity to the antisense strand is set forth in SEQ ID NO: 1096, wherein the antisense and sense strands are separate strands that form an asymmetric duplex region having an overhang of 1-4 nucleotides at the 3′ terminus of the antisense strand.

[1064] In some embodiments, an oligonucleotide (e.g., a RNAi oligonucleotide) for reducing MAPT gene expression comprises (i) an antisense strand of 19-30 nucleotides in length, wherein the antisense strand comprises a nucleotide sequence comprising a region of complementarity to a MAPT mRNA target sequence, wherein the region of complementarity is set forth in SEQ ID NO: 1503; and (ii) a sense strand of 19-50 nucleotides in length comprising a region of complementarity to the antisense strand, wherein the region of complementarity to the antisense strand is set forth in SEQ ID NO: 1119, wherein the antisense and sense strands are separate strands that form an asymmetric duplex region having an overhang of 1-4 nucleotides at the 3′ terminus of the antisense strand.

[1065] In some embodiments, an oligonucleotide (e.g., a RNAi oligonucleotide) for reducing MAPT gene expression comprises (i) an antisense strand of 19-30 nucleotides in length, wherein the antisense strand comprises a nucleotide sequence comprising a region of complementarity to a MAPT mRNA target sequence, wherein the region of complementarity is set forth in SEQ ID NO: 1504; and (ii) a sense strand of 19-50 nucleotides in length comprising a region of complementarity to the antisense strand, wherein the region of complementarity to the antisense strand is set forth in SEQ ID NO: 1120, wherein the antisense and sense strands are separate strands that form an asymmetric duplex region having an overhang of 1-4 nucleotides at the 3′ terminus of the antisense strand.

[1066] In some embodiments, an oligonucleotide (e.g., a RNAi oligonucleotide) for reducing MAPT gene expression comprises (i) an antisense strand of 19-30 nucleotides in length, wherein the antisense strand comprises a nucleotide sequence comprising a region of complementarity to a MAPT mRNA target sequence, wherein the region of complementarity is set forth in SEQ ID NO: 1508; and (ii) a sense strand of 19-50 nucleotides in length comprising a region of complementarity to the antisense strand, wherein the region of complementarity to the antisense strand is set forth in SEQ ID NO: 1124, wherein the antisense and sense strands are separate strands that form an asymmetric duplex region having an overhang of 1-4 nucleotides at the 3′ terminus of the antisense strand.

[1067] In some embodiments, an oligonucleotide (e.g., a RNAi oligonucleotide) for reducing MAPT gene expression comprises (i) an antisense strand of 19-30 nucleotides in length, wherein the antisense strand comprises a nucleotide sequence comprising a region of complementarity to a MAPT mRNA target sequence, wherein the region of complementarity is set forth in SEQ ID NO: 1514; and (ii) a sense strand of 19-50 nucleotides in length comprising a region of complementarity to the antisense strand and a stem-loop at the 3′ terminus, wherein the region of complementarity to the antisense strand is set forth in SEQ ID NO: 1130, wherein the stem-loop is set forth as 51-L-S2, wherein S1 is complementary to S2 and wherein L forms a loop between S1 and S2 of 3 to 5 nucleotides in length, wherein the antisense and sense strands are separate strands that form an asymmetric duplex region having an overhang of 1-4 nucleotides at the 3′ terminus of the antisense strand.

[1068] In some embodiments, an oligonucleotide (e.g., a RNAi oligonucleotide) for reducing MAPT gene expression comprises (i) an antisense strand of 19-30 nucleotides in length, wherein the antisense strand comprises a nucleotide sequence comprising a region of complementarity to a MAPT mRNA target sequence, wherein the region of complementarity is set forth in SEQ ID NO: 1479; and (ii) a sense strand of 19-50 nucleotides in length comprising a region of complementarity to the antisense strand and a stem-loop at the 3′ terminus, wherein the region of complementarity to the antisense strand is set forth in SEQ ID NO: 1095, wherein the stem-loop is set forth as S1-L-S2, wherein S1 is complementary to S2 and wherein L forms a loop between S1 and S2 of 3 to 5 nucleotides in length, wherein the antisense and sense strands are separate strands that form an asymmetric duplex region having an overhang of 1-4 nucleotides at the 3′ terminus of the antisense strand.

[1069] In some embodiments, an oligonucleotide (e.g., a RNAi oligonucleotide) for reducing MAPT gene expression comprises (i) an antisense strand of 19-30 nucleotides in length, wherein the antisense strand comprises a nucleotide sequence comprising a region of complementarity to a MAPT mRNA target sequence, wherein the region of complementarity is set forth in SEQ ID NO: 1480; and (ii) a sense strand of 19-50 nucleotides in length comprising a region of complementarity to the antisense strand and a stem-loop at the 3′ terminus, wherein the region of complementarity to the antisense strand is set forth in SEQ ID NO: 1096, wherein the stem-loop is set forth as S1-L-S2, wherein S1 is complementary to S2 and wherein L forms a loop between S1 and S2 of 3 to 5 nucleotides in length, wherein the antisense and sense strands are separate strands that form an asymmetric duplex region having an overhang of 1-4 nucleotides at the 3′ terminus of the antisense strand.

[1070] In some embodiments, an oligonucleotide (e.g., a RNAi oligonucleotide) for reducing MAPT gene expression comprises (i) an antisense strand of 19-30 nucleotides in length, wherein the antisense strand comprises a nucleotide sequence comprising a region of complementarity to a MAPT mRNA target sequence, wherein the region of complementarity is set forth in SEQ ID NO: 1503; and (ii) a sense strand of 19-50 nucleotides in length comprising a region of complementarity to the antisense strand and a stem-loop at the 3′ terminus, wherein the region of complementarity to the antisense strand is set forth in SEQ ID NO: 1119, wherein the stem-loop is set forth as S1-L-S2, wherein S1 is complementary to S2 and wherein L forms a loop between S1 and S2 of 3 to 5 nucleotides in length, wherein the antisense and sense strands are separate strands that form an asymmetric duplex region having an overhang of 1-4 nucleotides at the 3′ terminus of the antisense strand.

[1071] In some embodiments, an oligonucleotide (e.g., a RNAi oligonucleotide) for reducing MAPT gene expression comprises (i) an antisense strand of 19-30 nucleotides in length, wherein the antisense strand comprises a nucleotide sequence comprising a region of complementarity to a MAPT mRNA target sequence, wherein the region of complementarity is set forth in SEQ ID NO: 1504; and (ii) a sense strand of 19-50 nucleotides in length comprising a region of complementarity to the antisense strand and a stem-loop at the 3′ terminus, wherein the region of complementarity to the antisense strand is set forth in SEQ ID NO: 1120, wherein the stem-loop is set forth as S1-L-S2, wherein S1 is complementary to S2 and wherein L forms a loop between S1 and S2 of 3 to 5 nucleotides in length, wherein the antisense and sense strands are separate strands that form an asymmetric duplex region having an overhang of 1-4 nucleotides at the 3′ terminus of the antisense strand.

[1072] In some embodiments, an oligonucleotide (e.g., a RNAi oligonucleotide) for reducing MAPT gene expression comprises (i) an antisense strand of 19-30 nucleotides in length, wherein the antisense strand comprises a nucleotide sequence comprising a region of complementarity to a MAPT mRNA target sequence, wherein the region of complementarity is set forth in SEQ ID NO: 1508; and (ii) a sense strand of 19-50 nucleotides in length comprising a region of complementarity to the antisense strand and a stem-loop at the 3′ terminus, wherein the region of complementarity to the antisense strand is set forth in SEQ ID NO: 1124, wherein the stem-loop is set forth as S1-L-S2, wherein S1 is complementary to S2 and wherein L forms a loop between S1 and S2 of 3 to 5 nucleotides in length, wherein the antisense and sense strands are separate strands that form an asymmetric duplex region having an overhang of 1-4 nucleotides at the 3′ terminus of the antisense strand.

[1073] In some embodiments, an oligonucleotide (e.g., a RNAi oligonucleotide) for reducing MAPT gene expression comprises (i) an antisense strand of 19-30 nucleotides in length, wherein the antisense strand comprises a nucleotide sequence comprising a region of complementarity to a MAPT mRNA target sequence, wherein the region of complementarity is set forth in SEQ ID NO: 1479; and (ii) a sense strand of 19-25 nucleotides in length comprising a region of complementarity to the antisense strand, wherein the region of complementarity to the antisense strand is set forth in SEQ ID NO: 1095, wherein the oligonucleotide comprises a blunt end comprising the 3′ end of the sense strand, wherein the antisense and sense strands are separate strands that form an asymmetric duplex region having an overhang of 1-4 nucleotides at the 3′ terminus of the antisense strand.

[1074] In some embodiments, an oligonucleotide (e.g., a RNAi oligonucleotide) for reducing MAPT gene expression comprises a sense strand and an antisense strand according to:
[1075] Sense Strand: 5′-mX-S-mX-fX-mX-fX-mX-mX-fX-mX-fX-mX-fX-fX-mX-fX-mX-fX-mX-mX-mX-mX-mX-mX-mX-mX-mX-mX-[ademX-GalNAc]-[ademX-GalNAc]-[ademX-GalNAc]-mX-mX-mX-mX-mX-mX-3′ hybridized to:
[1076] Antisense Strand: 5′-[MePhosphonate-4O-mX]-S-fX-S-fX-fX-fX-mX-fX-mX-mX-fX-mX-mX-mX-fX-mX-fX-mX-mX-fX-mX-S-mX-S-mX-3′, wherein mX=2′-OMe-modified nucleotide, fX=2′-F-modified nucleotide, -S-=phosphorothioate linkage, -=phosphodiester linkage, [MePhosphonate-4O-mX]=4′-O-monomethylphosphonate-2′-O-methyl-modified nucleotide, and ademX-GalNAc=GalNAc attached to a nucleotide.

[1077] In some embodiments, an oligonucleotide (e.g., a RNAi oligonucleotide) for reducing MAPT gene expression comprises a sense strand and an antisense strand according to:
[1078] Sense Strand: 5′-mX-S-mX-mX-mX-mX-mX-mX-fX-fX-fX-fX-mX-mX-mX-mX-mX-mX-mX-mX-mX-mX-mX-mX-mX-mX-mX-mX-[ademX-GalNAc]-[ademX-GalNAc]-[ademX-GalNAc]-mX-mX-mX-mX-mG-mX-3′ hybridized to:
[1079] Antisense Strand: 5′-[MePhosphonate-4O-mX]-S-fX-S-fX-S-fX-fX-mX-fX-mX-mX-fX-mX-mX-mX-fX-mX-mX-mX-mX-mX-mX-S-mX-S-mX-3′, wherein mX=2′-OMe-modified nucleotide, fX=2′-F-modified nucleotide, -S-=phosphorothioate linkage, -=phosphodiester linkage, [MePhosphonate-4O-mX]=4′-O-monomethylphosphonate-2′-O-methyl modified nucleotide, and ademX-GalNAc=GalNAc attached to a nucleotide.

[1080] In some embodiments, an oligonucleotide (e.g., a RNAi oligonucleotide) for reducing MAPT gene expression comprises a sense strand and an antisense strand according to:
[1081] Sense Strand: 5′-[AdemX-L]-S-mX-fX-mX-fX-mX-mX-fX-mX-fX-mX-fX-fX-mX-fX-mX-fX-mX-S-mX-S-mX-3′ hybridized to:
[1082] Antisense Strand: 5′-[MePhosphonate-4O-mX]-S-fX-S-fX-fX-fX-mX-fX-mX-mX-fX-mX-mX-mX-fX-mX-fX-mX-mX-fX-mX-S-mX-S-mX-3′, wherein mX=2′-OMe-modified nucleotide, fX=2′-F-modified nucleotide, -S-=phosphorothioate linkage, -=phosphodiester linkage, [MePhosphonate-4O-mX]=4′-O-monomethylphosphonate-2′-O-methyl modified nucleotide, and ademX-L=lipid moiety attached to a nucleotide.

[1083] In some embodiments, an oligonucleotide (e.g., a RNAi oligonucleotide) for reducing MAPT gene expression comprises a sense strand and an antisense strand according to:
[1084] Sense Strand: 5′-[AdemX-C16]-S-mX-fX-mX-fX-mX-mX-fX-mX-fX-mX-fX-fX-mX-fX-mX-fX-mX-S-mX-S-mX-3′ hybridized to:
[1085] Antisense Strand: 5′-[MePhosphonate-4O-mX]-S-fX-S-fX-fX-fX-mX-fX-mX-mX-fX-mX-mX-mX-fX-mX-fX-mX-mX-fX-mX-S-mX-S-mX-3′, wherein mX=2′-OMe-modified nucleotide, fX=2′-F-modified nucleotide, -S-=phosphorothioate linkage, -=phosphodiester linkage, [MePhosphonate-4O-mX]=4′-O-monomethylphosphonate-2′-O-methyl modified nucleotide, and ademX-C16=C₁₆ hydrocarbon chain attached to a nucleotide.

[1086] In some embodiments, the current disclosure provides an oligonucleotide (e.g., a RNAi oligonucleotide) for reducing MAPT gene expression, wherein the oligonucleotide comprises a sense strand and an antisense strand comprising nucleotide sequences selected from the group consisting of:
[1087] a) SEQ ID NOs: 839 and 874, respectively;
[1088] b) SEQ ID NOs: 840 and 875, respectively;
[1089] c) SEQ ID NOs: 841 and 876, respectively;
[1090] d) SEQ ID NOs: 842 and 877, respectively;
[1091] e) SEQ ID NOs: 843 and 878, respectively;
[1092] f) SEQ ID NOs: 844 and 879, respectively;
[1093] g) SEQ ID NOs: 845 and 880, respectively;
[1094] h) SEQ ID NOs: 846 and 881, respectively;
[1095] i) SEQ ID NOs: 847 and 882, respectively;
[1096] j) SEQ ID NOs: 848 and 883, respectively;
[1097] k) SEQ ID NOs: 849 and 884, respectively;
[1098] l) SEQ ID NOs: 850 and 885, respectively;
[1099] m) SEQ ID NOs: 851 and 886, respectively;
[1100] n) SEQ ID NOs: 852 and 887, respectively;
[1101] o) SEQ ID NOs: 853 and 888, respectively;
[1102] p) SEQ ID NOs: 854 and 889, respectively;
[1103] q) SEQ ID NOs: 855 and 890, respectively;
[1104] r) SEQ ID NOs: 856 and 891, respectively;
[1105] s) SEQ ID NOs: 857 and 892, respectively;
[1106] t) SEQ ID NOs: 858 and 893, respectively;
[1107] u) SEQ ID NOs: 859 and 894, respectively;
[1108] v) SEQ ID NOs: 860 and 895, respectively;
[1109] w) SEQ ID NOs: 861 and 896, respectively;
[1110] x) SEQ ID NOs: 862 and 897, respectively;
[1111] y) SEQ ID NOs: 863 and 898, respectively;
[1112] z) SEQ ID NOs: 864 and 899, respectively;
[1113] aa) SEQ ID NOs: 865 and 900, respectively;
[1114] bb) SEQ ID NOs: 866 and 901, respectively;
[1115] cc) SEQ ID NOs: 867 and 902, respectively;
[1116] dd) SEQ ID NOs: 868 and 903, respectively;
[1117] ee) SEQ ID NOs: 869 and 904, respectively;
[1118] ff) SEQ ID NOs: 870 and 905, respectively;
[1119] gg) SEQ ID NOs: 871 and 906, respectively;
[1120] hh) SEQ ID NOs: 872 and 907, respectively;
[1121] ii) SEQ ID NOs: 873 and 908, respectively; and
[1122] jj) SEQ ID NOs: 1682 and 885, respectively.

[1123] In some embodiments, an oligonucleotide (e.g., a RNAi oligonucleotide) for reducing MAPT gene expression comprises a sense strand and an antisense strand comprising nucleotide sequences selected from the group consisting of:
[1124] a) SEQ ID NOs: 860 and 895, respectively;
[1125] b) SEQ ID NOs: 865 and 900, respectively;
[1126] c) SEQ ID NOs: 868 and 903, respectively;
[1127] d) SEQ ID NOs: 869 and 904, respectively;
[1128] e) SEQ ID NOs: 873 and 908, respectively;
[1129] f) SEQ ID NOs: 841 and 876, respectively;
[1130] g) SEQ ID NOs: 846 and 881, respectively;
[1131] h) SEQ ID NOs: 850 and 885, respectively;
[1132] i) SEQ ID NOs: 851 and 886, respectively;
[1133] j) SEQ ID NOs: 852 and 887, respectively; and
[1134] k) SEQ ID NOs: 1682 and 885, respectively.

[1135] In some embodiments, an oligonucleotide (e.g., a RNAi oligonucleotide) for reducing MAPT gene expression comprises a sense strand and an antisense strand comprising nucleotide sequences selected from the group consisting of:
[1136] a) SEQ ID NOs: 841 and 876, respectively;
[1137] b) SEQ ID NOs: 850 and 885, respectively;
[1138] c) SEQ ID NOs: 851 and 886, respectively;
[1139] d) SEQ ID NOs: 868 and 903, respectively;
[1140] e) SEQ ID NOs: 869 and 904, respectively;
[1141] f) SEQ ID NOs: 873 and 908, respectively; and
[1142] g) SEQ ID NOs: 1682 and 885, respectively.

[1143] In some embodiments, an oligonucleotide for reducing MAPT gene expression comprises a sense strand comprising the nucleotide sequence as set forth in SEQ ID NO: 841 and an antisense strand comprising the nucleotide sequence as set forth in SEQ ID NO: 876. In some embodiments, an oligonucleotide for reducing MAPT gene expression comprises a sense strand comprising the nucleotide sequence as set forth in SEQ ID NO: 850 and an antisense strand comprising the nucleotide sequence as set forth in SEQ ID NO: 885. In some embodiments, an oligonucleotide for reducing MAPT gene expression comprises a sense strand comprising the nucleotide sequence as set forth in SEQ ID NO: 851 and an antisense strand comprising the nucleotide sequence as set forth in SEQ ID NO: 886. In some embodiments, an oligonucleotide for reducing MAPT gene expression comprises a sense strand comprising the nucleotide sequence as set forth in SEQ ID NO: 868 and an antisense strand comprising the nucleotide sequence as set forth in SEQ ID NO: 903. In some embodiments, an oligonucleotide for reducing MAPT gene expression comprises a sense strand comprising the nucleotide sequence as set forth in SEQ ID NO: 869 and an antisense strand comprising the nucleotide sequence as set forth in SEQ ID NO: 904. In some embodiments, an oligonucleotide for reducing MAPT gene expression comprises a sense strand comprising the nucleotide sequence as set forth in SEQ ID NO: 873 and an antisense strand comprising the nucleotide sequence as set forth in SEQ ID NO: 908. In some embodiments, an oligonucleotide for reducing MAPT gene expression comprises a sense strand comprising the nucleotide sequence as set forth in SEQ ID NO: 1682 and an antisense strand comprising the nucleotide sequence as set forth in SEQ ID NO: 885.

[1144] Formulations

[1145] Various formulations have been developed to facilitate oligonucleotide use. For example, oligonucleotides (e.g., RNAi oligonucleotides) can be delivered to a subject or a cellular environment using a formulation that minimizes degradation, facilitates delivery and/or uptake, or provides another beneficial property to the oligonucleotides in the formulation. In some embodiments, provided herein are compositions comprising oligonucleotides reduce MAPT gene expression. Such compositions can be suitably formulated such that when administered to a subject, either into the immediate environment of a target cell or systemically, a sufficient portion of the oligonucleotides enter the cell to reduce MAPT gene expression. Any variety of suitable oligonucleotide formulations can be used to deliver oligonucleotides for the reduction of MAPT gene expression as disclosed herein. In some embodiments, an oligonucleotide is formulated in buffer solutions such as phosphate buffered saline solutions, liposomes, micellar structures, and capsids. In some embodiments, an oligonucleotide is formulated in buffer solutions such as phosphate buffered saline solutions.

[1146] Formulations of oligonucleotides with cationic lipids can be used to facilitate transfection of the oligonucleotides into cells. For example, cationic lipids, such as lipofectin, cationic glycerol derivatives, and polycationic molecules (e.g., polylysine, can be used. Suitable lipids include Oligofectamine, Lipofectamine (Life Technologies), NC388 (Ribozyme Pharmaceuticals, Inc., Boulder, Colo.), or FuGene 6 (Roche) all of which can be used according to the manufacturer's instructions. In some embodiments, an oligonucleotide is not formulated with a component to facilitate transfection into cells.

[1147] Accordingly, in some embodiments, a formulation comprises a lipid nanoparticle. In some embodiments, an excipient comprises a liposome, a lipid, a lipid complex, a microsphere, a microparticle, a nanosphere or a nanoparticle, or may be otherwise formulated for administration to the cells, tissues, organs, or body of a subject in need thereof (see, e.g., Remington: THE SCIENCE AND PRACTICE OF PHARMACY, 22nd edition, Pharmaceutical Press, 2013).

[1148] In some embodiments, the formulations herein comprise an excipient. In some embodiments, an excipient confers to a composition improved stability, improved absorption, improved solubility and/or therapeutic enhancement of the active ingredient. In some embodiments, an excipient is a buffering agent (e.g., sodium citrate, sodium phosphate, a tris base, or sodium hydroxide) or a vehicle (e.g., a buffered solution, petrolatum, dimethyl sulfoxide, or mineral oil). In some embodiments, an oligonucleotide is lyophilized for extending its shelf-life and then made into a solution before use (e.g., administration to a subject). Accordingly, an excipient in a composition comprising any one of the oligonucleotides described herein may be a lyoprotectant (e.g., mannitol, lactose, polyethylene glycol, or polyvinylpyrrolidone) or a collapse temperature modifier (e.g., dextran, Ficoll™, or gelatin).

[1149] In some embodiments, a pharmaceutical composition is formulated to be compatible with its intended route of administration. Examples of routes of administration include parenteral (e.g., intravenous, intramuscular, intraperitoneal, intradermal, subcutaneous), oral (e.g., inhalation), transdermal (e.g., topical), transmucosal, and rectal administration.

[1150] In some embodiments, a pharmaceutical composition is formulated for administration into the central nervous system. In some embodiments, a pharmaceutical composition is formulated for administration into the cerebral spinal fluid. In some embodiments, a pharmaceutical composition is formulated for administration to the spinal cord. In some embodiments, a pharmaceutical composition is formulated for intrathecal administration. In some embodiments, a pharmaceutical composition is formulated for administration to the brain. In some embodiments, a pharmaceutical composition is formulated for intracerebroventricular administration. In some embodiments, a pharmaceutical composition is formulated for the brain stem. In some embodiments, a pharmaceutical composition is formulated for intracisternal magna administration.

[1151] Pharmaceutical compositions suitable for injectable use include sterile aqueous solutions (where water soluble) or dispersions and sterile powders for the extemporaneous preparation of sterile injectable solutions or dispersion. For intravenous administration, suitable carriers include physiological saline, bacteriostatic water, Cremophor EL™ (BASF), or phosphate buffered saline (PBS). The carrier can be a solvent or dispersion medium containing, for example, water, ethanol, polyol (e.g., glycerol, propylene glycol, liquid polyethylene glycol, and the like), and suitable mixtures thereof. In many cases, it will be preferable to include isotonic agents, for example, sugars, polyalcohols such as mannitol, sorbitol, and/or sodium chloride in the composition. Sterile injectable solutions can be prepared by incorporating the oligonucleotides in a required amount in a selected solvent with one or a combination of ingredients enumerated above, as required, followed by filtered sterilization.

[1152] In some embodiments, a composition may contain at least about 0.1% of the therapeutic agent (e.g., a RNAi oligonucleotide for reducing MAPT gene expression) or more, although the percentage of the active ingredient(s) may be between about 1% to about 80% or more of the weight or volume of the total composition. Factors such as solubility, bioavailability, biological half-life, route of administration, product shelf life, as well as other pharmacological considerations will be contemplated by one skilled in the art of preparing such pharmaceutical formulations, and as such, a variety of dosages and treatment regimens may be desirable.

[1153] Methods of Use

[1154] Reducing MAPT Gene Expression

[1155] In some embodiments, the disclosure provides methods for contacting or delivering to a cell or population of cells an effective amount of any of the oligonucleotides (e.g., RNAi oligonucleotides) herein to reduce MAPT gene expression. In some embodiments, a reduction of MAPT gene expression is determined by measuring a reduction in the amount or level of MAPT mRNA, Tau protein, or Tau activity in a cell. The methods include those described herein and known to one of ordinary skill in the art.

[1156] In some embodiments, the disclosure provides methods for reducing MAPT gene expression in the CNS. In some embodiments, the CNS comprises the brain and spinal cord. In some embodiments, MAPT gene expression is reduced in at least one region of the brain. In some embodiments, regions of the brain cervical spinal cord, thoracic spinal cord, lumbar spinal cord, frontal cortex, temporal cortex, cerebellum, midbrain, occipital cortex, parietal cortex, hippocampus, caudate nucleus, thalamus, and brainstem. In some embodiments, MAPT gene expression is reduced in at least one region of the spinal cord. In some embodiments, regions of the spinal cord include the cervical spinal cord, thoracic spinal cord, and lumbar spinal cord. In some embodiments, MAPT gene expression is reduced in at least one region of the brain and at least one region of the spinal cord. In some embodiments, MAPT gene expression is reduced in at least one of the cervical spinal cord, thoracic spinal cord, lumbar spinal cord, frontal cortex, temporal cortex, cerebellum, midbrain, occipital cortex, parietal cortex, hippocampus, caudate nucleus, thalamus, brainstem, motor cortex, globus pallidus, midbrain tegmentum, substantia nigra, pons, cerebellar white matter, and cerebellar dentate nucleus. In some embodiments, MAPT gene expression is reduced in at least one of the lumbar spinal cord, thoracic spinal cord, and cervical spinal cord. In some embodiments, MAPT gene expression is reduced in tissue of the brain and/or spinal cord associated with Alzheimer's disease. In some embodiments, tissue associated with AD includes, but is not limited to, prefrontal cortex, motor cortex, temporal cortex, parietal cortex, and hippocampus. In some embodiments, MAPT gene expression is reduced in tissue of the brain and/or spinal cord associated with progressive supranuclear palsy. In some embodiments, tissue associated with AD includes, but is not limited to caudate nucleus, globus pallidus, thalamus, midbrain tegmentum, substantia nigra, pons, cerebellar white matter, cerebellar dentate nucleus, medulla, cervical spinal cord, thoracic spinal cord, and lumbar spinal cord.

[1157] In some embodiments, MAPT gene expression is reduced for about 1 week to about 12 weeks after administration of an oligonucleotide described herein. In some embodiments, MAPT gene expression is reduced for 1, 2, 3, 4, 5, 6, 7, 8, 9, 10, 11, or 12 weeks after administration of an oligonucleotide described herein. In some embodiments, MAPT expression is reduced for about 1 to about 4 months after administration of an oligonucleotide described herein. In some embodiments, MAPT expression is reduced for about 1 to about 6 months after administration of an oligonucleotide described herein. In some embodiments, MAPT gene expression is reduced for 1, 2, 3, or 4 months after administration of an oligonucleotide described herein. In some embodiments, MAPT gene expression is reduced for 1, 2, 3 4, 5, or 6 months after administration of an oligonucleotide described herein. In some embodiments, MAPT gene expression is reduced for about 7 to about 91 days after administration of an oligonucleotide described herein. In some embodiments, MAPT gene expression is reduced for 7, 14, 21, 28, 35, 42, 49, 56, 63, 70, 77, 84, or 91 days after administration of an oligonucleotide described herein.

[1158] In some embodiments, MAPT gene expression is reduced in at least one region of the brain and/or at least one region of the spinal cord for about 1 to about 12 weeks after administration of an oligonucleotide described herein. In some embodiments, MAPT gene expression is reduced in at least one region of the brain and/or at least one region of the spinal cord for 1, 2, 3, 4, 5, 6, 7, 8, 9, 10, 11, or 12 weeks after administration of an oligonucleotide described herein. In some embodiments, MAPT gene expression is reduced in at least one region of the brain and/or at least one region of the spinal cord for about 1 to about 4 months after administration of an oligonucleotide described herein. In some embodiments, MAPT gene expression is reduced in at least one region of the brain and/or at least one region of the spinal cord for about 1 to about 6 months after administration of an oligonucleotide described herein. In some embodiments, MAPT gene expression is reduced in at least one region of the brain and/or at least one region of the spinal cord for 1, 2, 3, or 4 months after administration of an oligonucleotide described herein. In some embodiments, MAPT gene expression is reduced in at least one region of the brain and/or at least one region of the spinal cord for 1, 2, 3 4, 5, or 6 months after administration of an oligonucleotide described herein. In some embodiments, MAPT gene expression is reduced in at least one region of the brain and/or at least one region of the spinal cord for about 7 to about 91 days after administration of an oligonucleotide described herein. In some embodiments, MAPT gene expression is reduced in at least one region of the brain and/or at least one region of the spinal cord for 7, 14, 21, 28, 35, 42, 49, 56, 63, 70, 77, 84, or 91 days after administration of an oligonucleotide described herein.

[1159] Methods provided herein are useful in any appropriate cell type. In some embodiments, a cell is any cell that expresses MAPT mRNA (e.g., oligodendrocyte). In some embodiments, the cell is a primary cell obtained from a subject. In some embodiments, the primary cell has undergone a limited number of passages such that the cell substantially maintains is natural phenotypic properties. In some embodiments, a cell to which the oligonucleotide is delivered is ex vivo or in vitro (i.e., can be delivered to a cell in culture or to an organism in which the cell resides).

[1160] In some embodiments, the oligonucleotides disclosed herein are delivered to a cell or population of cells using a nucleic acid delivery method known in the art including, but not limited to, injection of a solution or pharmaceutical composition containing the oligonucleotide, bombardment by particles covered by the oligonucleotide, exposing the cell or population of cells to a solution containing the oligonucleotide, or electroporation of cell membranes in the presence of the oligonucleotide. Other methods known in the art for delivering oligonucleotides to cells may be used, such as lipid-mediated carrier transport, chemical-mediated transport, and cationic liposome transfection such as calcium phosphate, and others.

[1161] In some embodiments, reduction of MAPT gene expression is determined by an assay or technique that evaluates one or more molecules, properties or characteristics of a cell or population of cells associated with MAPT gene expression, or by an assay or technique that evaluates molecules that are directly indicative of MAPT gene expression in a cell or population of cells (e.g., MAPT mRNA or Tau protein). In some embodiments, the extent to which an oligonucleotide reduces MAPT gene expression is evaluated by comparing MAPT gene expression in a cell or population of cells contacted with the oligonucleotide to a control cell or population of cells (e.g., a cell or population of cells not contacted with the oligonucleotide or contacted with a control oligonucleotide). In some embodiments, a control amount or level of MAPT gene expression in a control cell or population of cells is predetermined, such that the control amount or level need not be measured in every instance the assay or technique is performed. The predetermined level or value can take a variety of forms. In some embodiments, a predetermined level or value can be single cut-off value, such as a median or mean.

[1162] In some embodiments, contacting or delivering an oligonucleotide to a cell or a population of cells results in a reduction in MAPT gene expression. In some embodiments, the reduction in MAPT gene expression is relative to a control amount or level of MAPT gene expression in cell or population of cells not contacted with the oligonucleotide or contacted with a control oligonucleotide. In some embodiments, the reduction in MAPT gene expression is about 1% or lower, about 5% or lower, about 10% or lower, about 15% or lower, about 20% or lower, about 25% or lower, about 30% or lower, about 35% or lower, about 40% or lower, about 45% or lower, about 50% or lower, about 55% or lower, about 60% or lower, about 70% or lower, about 80% or lower, or about 90% or lower relative to a control amount or level of MAPT gene expression. In some embodiments, the control amount or level of MAPT gene expression is an amount or level of MAPT mRNA and/or Tau protein in a cell or population of cells that has not been contacted with an oligonucleotide herein. In some embodiments, the effect of delivery of an oligonucleotide to a cell or population of cells according to a method herein is assessed after any finite period or amount of time (e.g., minutes, hours, days, weeks, months). For example, in some embodiments, MAPT gene expression is determined in a cell or population of cells at least about 4 hours, about 8 hours, about 12 hours, about 18 hours, about 24 hours; or at least about 1 day, about 2 days, about 3 days, about 4 days, about 5 days, about 6 days, about 7 days, about 8 days, about 9 days, about 10 days, about 11 days, about 12 days, about 13 days, about 14 days, about 21 days, about 28 days, about 35 days, about 42 days, about 49 days, about 56 days, about 63 days, about 70 days, about 77 days, about 84 days, or more after contacting or delivering the oligonucleotide to the cell or population of cells. In some embodiments, MAPT gene expression is determined in a cell or population of cells at least about 1 month, about 2 months, about 3 months, about 4 months, about 5 months, about 6 months, or more after contacting or delivering the oligonucleotide to the cell or population of cells.

[1163] In some embodiments, the oligonucleotide is delivered in the form of a transgene that is engineered to express in a cell the oligonucleotide or strands comprising the oligonucleotide (e.g., its sense and antisense strands). In some embodiments, the oligonucleotide is delivered using a transgene engineered to express any oligonucleotide disclosed herein. Transgenes may be delivered using viral vectors (e.g., adenovirus, retrovirus, vaccinia virus, poxvirus, adeno-associated virus, or herpes simplex virus) or non-viral vectors (e.g., plasmids or synthetic mRNAs). In some embodiments, transgenes can be injected directly to a subject.

[1164] Treatment Methods

[1165] The disclosure also provides oligonucleotides (e.g., RNAi oligonucleotides) for use, or adaptable for use, to treat a subject (e.g., a human having a disease, disorder, or condition associated withMAPT gene expression) that would benefit from reducing MAPT gene expression. In some aspects, the disclosure provides oligonucleotides for use, or adapted for use, to treat a subject having a disease, disorder, or condition associated with MAPT gene expression. The disclosure also provides oligonucleotides for use, or adaptable for use, in the manufacture of a medicament or pharmaceutical composition for treating a disease, disorder, or condition associated with MAPT gene expression. In some embodiments, the oligonucleotides for use, or adaptable for use, target MAPT mRNA and reduce MAPT gene expression (e.g., via the RNAi pathway). In some embodiments, the oligonucleotides for use, or adaptable for use, target MAPT mRNA and reduce the amount or level of MAPT mRNA, Tau protein, and/or Tau activity.

[1166] In addition, in some embodiments of the methods herein, a subject having a disease, disorder or condition associated with MAPT gene expression or is predisposed to the same is selected for treatment with an oligonucleotide (e.g., a ds oligonucleotide) herein. In some embodiments, the method comprises selecting an individual having a marker (e.g., a biomarker) for a disease, disorder, or condition associated with MAPT gene expression, or predisposed to the same, such as, but not limited to, MAPT mRNA, Tau protein, or a combination thereof. Likewise, and as detailed below, some embodiments of the methods provided by the disclosure include steps such as measuring or obtaining a baseline value for a marker of MAPT gene expression (e.g., Tau protein or Tau activity), and then comparing such obtained value to one or more other baseline values or values obtained after the subject is administered the oligonucleotide to assess the effectiveness of treatment.

[1167] The disclosure also provides methods of treating a subject having, suspected of having, or at risk of developing a disease, disorder, or condition associated with MAPT gene expression with an oligonucleotide provided herein. In some aspects, the disclosure provides methods of treating or attenuating the onset or progression of a disease, disorder, or condition associated with MAPT gene expression using the oligonucleotides provided herein. In other aspects, the disclosure provides methods to achieve one or more therapeutic benefits in a subject having a disease, disorder, or condition associated with MAPT gene expression using the oligonucleotides provided herein. In some embodiments of the methods herein, the subject is treated by administering a therapeutically effective amount of any one or more of the oligonucleotides provided herein. In some embodiments, treatment comprises reducing MAPT gene expression. In some embodiments, the subject is treated therapeutically. In some embodiments, the subject is treated prophylactically.

[1168] In some embodiments of the methods herein, an oligonucleotide (e.g., a RNAi oligonucleotide), or a pharmaceutical composition comprising the oligonucleotide, is administered to a subject having a disease, disorder, or condition associated with MAPT gene expression such that MAPT gene expression is reduced in the subject, thereby treating the subject. In some embodiments, an amount or level of MAPT mRNA is reduced in the subject. In some embodiments, an amount or level of Tau protein is reduced in the subject.

[1169] In some embodiments of the methods herein, the oligonucleotide, or a pharmaceutical composition comprising the oligonucleotide, is administered to a subject having a disease, disorder, or condition associated with MAPT gene expression such that MAPT gene expression is reduced in the subject by at least about 30%, about 35%, about 40%, about 45%, about 50%, about 55%, about 60%, about 65%, about 70%, about 75%, about 80%, about 85%, about 90%, about 95%, about 99%, or greater than 99% when compared to MAPT gene expression prior to administration of the oligonucleotide or pharmaceutical composition. In some embodiments of the methods herein, the oligonucleotide, or the pharmaceutical composition comprising the oligonucleotide, is administered to a subject having a disease, disorder, or condition associated with MAPT gene expression such that MAPT gene expression is reduced in the subject by at least about 30%, about 35%, about 40%, about 45%, about 50%, about 55%, about 60%, about 65%, about 70%, about 75%, about 80%, about 85%, about 90%, about 95%, about 99%, or greater than 99% for about 1 week to about 12 weeks, about 1 month to about 6 months, or about 7 days to about 91 days when compared to MAPT gene expression prior to administration of the oligonucleotide or pharmaceutical composition. In some embodiments, MAPT gene expression is reduced in the subject by at least about 30%, about 35%, about 40%, about 45%, about 50%, about 55%, about 60%, about 65%, about 70%, about 75%, about 80%, about 85%, about 90%, about 95%, about 99%, or greater than 99% when compared to MAPT gene expression in a subject (e.g., a reference or control subject) not receiving the oligonucleotide or pharmaceutical composition or receiving a control oligonucleotide, pharmaceutical composition or treatment. In some embodiments, MAPT gene expression is reduced in the subject by at least about 30%, about 35%, about 40%, about 45%, about 50%, about 55%, about 60%, about 65%, about 70%, about 75%, about 80%, about 85%, about 90%, about 95%, about 99%, or greater than 99% for about 1 week to about 12 weeks, about 1 month to about 6 months, or about 7 days to about 91 days when compared to MAPT gene expression in a subject (e.g., a reference or control subject) not receiving the oligonucleotide or pharmaceutical composition or receiving a control oligonucleotide, pharmaceutical composition or treatment.

[1170] In some embodiments of the methods herein, the oligonucleotide or the pharmaceutical composition is administered to a subject having a disease, disorder, or condition associated with MAPT gene expression such that an amount or level of MAPT mRNA is reduced in the subject by at least about 30%, about 35%, about 40%, about 45%, about 50%, about 55%, about 60%, about 65%, about 70%, about 75%, about 80%, about 85%, about 90%, about 95%, about 99%, or greater than 99% when compared to the amount or level of MAPT mRNA prior to administration of the oligonucleotide or pharmaceutical composition. In some embodiments of the methods, the oligonucleotide or the pharmaceutical composition is administered to a subject having a disease, disorder, or condition associated with MAPT gene expression such that an amount or level of MAPT mRNA is reduced in the subject by at least about 30%, about 35%, about 40%, about 45%, about 50%, about 55%, about 60%, about 65%, about 70%, about 75%, about 80%, about 85%, about 90%, about 95%, about 99%, or greater than 99% for about 1 week to about 12 weeks, about 1 month to about 6 months, or about 7 days to about 91 days when compared to the amount or level of MAPT mRNA prior to administration of the oligonucleotide or pharmaceutical composition. In some embodiments, an amount or level of MAPT mRNA is reduced in the subject by at least about 30%, about 35%, about 40%, about 45%, about 50%, about 55%, about 60%, about 65%, about 70%, about 75%, about 80%, about 85%, about 90%, about 95%, about 99%, or greater than 99% when compared to an amount or level of MAPT mRNA in a subject (e.g., a reference or control subject) not receiving the oligonucleotide or pharmaceutical composition or receiving a control oligonucleotide, pharmaceutical composition or treatment. In some embodiments, an amount or level of MAPT mRNA is reduced in the subject by at least about 30%, about 35%, about 40%, about 45%, about 50%, about 55%, about 60%, about 65%, about 70%, about 75%, about 80%, about 85%, about 90%, about 95%, about 99%, or greater than 99% for about 1 week to about 12 weeks, about 1 month to about 6 months, or about 7 days to about 91 days when compared to an amount or level of MAPT mRNA in a subject (e.g., a reference or control subject) not receiving the oligonucleotide or pharmaceutical composition or receiving a control oligonucleotide, pharmaceutical composition or treatment.

[1171] In some embodiments of the methods, the oligonucleotide or the pharmaceutical composition is administered to a subject having a disease, disorder, or condition associated with MAPT gene expression such that an amount or level of Tau protein is reduced in the subject by at least about 30%, about 35%, about 40%, about 45%, about 50%, about 55%, about 60%, about 65%, about 70%, about 75%, about 80%, about 85%, about 90%, about 95%, about 99%, or greater than 99% when compared to the amount or level of Tau protein prior to administration of the oligonucleotide or pharmaceutical composition. In some embodiments of the methods herein, an oligonucleotide herein, or a pharmaceutical composition comprising the oligonucleotide, is administered to a subject having a disease, disorder, or condition associated with MAPT gene expression such that an amount or level of Tau protein is reduced in the subject by at least about 30%, about 35%, about 40%, about 45%, about 50%, about 55%, about 60%, about 65%, about 70%, about 75%, about 80%, about 85%, about 90%, about 95%, about 99%, or greater than 99% for about 1 week to about 12 weeks, about 1 month to about 6 months, or about 7 days to about 91 days when compared to the amount or level of Tau protein prior to administration of the oligonucleotide or pharmaceutical composition. In some embodiments, an amount or level of Tau protein is reduced in the subject by at least about 30%, about 35%, about 40%, about 45%, about 50%, about 55%, about 60%, about 65%, about 70%, about 75%, about 80%, about 85%, about 90%, about 95%, about 99%, or greater than 99% when compared to an amount or level of Tau protein in a subject (e.g., a reference or control subject) not receiving the oligonucleotide or pharmaceutical composition or receiving a control oligonucleotide, pharmaceutical composition or treatment. In some embodiments, an amount or level of Tau protein is reduced in the subject by at least about 30%, about 35%, about 40%, about 45%, about 50%, about 55%, about 60%, about 65%, about 70%, about 75%, about 80%, about 85%, about 90%, about 95%, about 99%, or greater than 99% for about 1 week to about 12 weeks, about 1 month to about 6 months, or about 7 days to about 91 days when compared to an amount or level of Tau protein in a subject (e.g., a reference or control subject) not receiving the oligonucleotide or pharmaceutical composition or receiving a control oligonucleotide, pharmaceutical composition or treatment.

[1172] In some embodiments of the methods, the oligonucleotide or the pharmaceutical composition is administered to a subject having a disease, disorder, or condition associated with MAPT gene expression such that an amount or level of Tau activity is reduced in the subject by at least about 30%, about 35%, about 40%, about 45%, about 50%, about 55%, about 60%, about 65%, about 70%, about 75%, about 80%, about 85%, about 90%, about 95%, about 99%, or greater than 99% when compared to the amount or level of Tau activity prior to administration of the oligonucleotide or pharmaceutical composition. In some embodiments, the oligonucleotide or the pharmaceutical composition is administered to a subject having a disease, disorder, or condition associated with MAPT gene expression such that an amount or level of Tau activity is reduced in the subject by at least about 30%, about 35%, about 40%, about 45%, about 50%, about 55%, about 60%, about 65%, about 70%, about 75%, about 80%, about 85%, about 90%, about 95%, about 99%, or greater than 99% for about 1 week to about 12 weeks, about 1 month to about 6 months, or about 7 days to about 91 days when compared to the amount or level of Tau activity prior to administration of the oligonucleotide or pharmaceutical composition. In some embodiments, an amount or level of Tau activity is reduced in the subject by at least about 30%, about 35%, about 40%, about 45%, about 50%, about 55%, about 60%, about 65%, about 70%, about 75%, about 80%, about 85%, about 90%, about 95%, about 99%, or greater than 99% when compared to an amount or level of Tau activity in a subject (e.g., a reference or control subject) not receiving the oligonucleotide or pharmaceutical composition or receiving a control oligonucleotide, pharmaceutical composition or treatment. In some embodiments, an amount or level of Tau activity is reduced in the subject by at least about 30%, about 35%, about 40%, about 45%, about 50%, about 55%, about 60%, about 65%, about 70%, about 75%, about 80%, about 85%, about 90%, about 95%, about 99%, or greater than 99% for about 1 week to about 12 weeks, about 1 month to about 6 months, or about 7 days to about 91 days when compared to an amount or level of Tau activity in a subject (e.g., a reference or control subject) not receiving the oligonucleotide or pharmaceutical composition or receiving a control oligonucleotide, pharmaceutical composition or treatment.

[1173] Suitable methods for determining MAPT gene expression, an amount or level of MAPT mRNA, an amount or level of Tau protein, and/or an amount or level of Tau activity, in the subject, or in a sample from the subject, are known in the art. Further, the Examples set forth herein illustrate exemplary methods for determining MAPT gene expression.

[1174] In some embodiments, MAPT gene expression, an amount or level of MAPT mRNA, an amount or level of Tau protein, an amount or level of Tau activity, or any combination thereof, is reduced in a cell (e.g., an oligodendrocyte), a population or a group of cells (e.g., an organoid), an organ (e.g., frontal cortex), blood or a fraction thereof (e.g., plasma), a tissue (e.g., brain tissue), a sample (e.g., a brain biopsy sample), or any other biological material obtained or isolated from the subject. In some embodiments, MAPT gene expression, an amount or level of MAPT mRNA, an amount or level of Tau protein, an amount or level of Tau activity, or any combination thereof, is reduced in more than one type of cell (e.g., an oligodendrocyte and one or more other type(s) of cell), more than one groups of cells, more than one organ (e.g., brain and one or more other organ(s)), more than one fraction of blood (e.g., plasma and one or more other blood fraction(s)), more than one type of tissue (e.g., brain tissue and one or more other type(s) of tissue), more than one type of sample (e.g., a brain biopsy sample and one or more other type(s) of biopsy sample) obtained or isolated from the subject. In some embodiments, MAPT gene expression, an amount or level of MAPT mRNA, an amount or level of Tau protein, an amount or level of Tau activity, or any combination thereof is reduced in one or more of the cervical spinal cord, thoracic spinal cord, lumbar spinal cord, frontal cortex, temporal cortex, cerebellum, midbrain, occipital cortex, parietal cortex, hippocampus, caudate nucleus, thalamus, brainstem, motor cortex, globus pallidus, midbrain tegmentum, substantia nigra, pons, cerebellar white matter, and cerebellar dentate nucleus. In some embodiments, MAPT gene expression, an amount or level of MAPT mRNA, an amount or level of Tau protein, an amount or level of Tau activity, or any combination thereof is reduced in tissue of the brain and/or spinal cord associated with AD. In some embodiments, tissue associated with AD includes, but is not limited to, prefrontal cortex, motor cortex, temporal cortex, parietal cortex, and hippocampus. In some embodiments, MAPT gene expression, an amount or level of MAPT mRNA, an amount or level of Tau protein, an amount or level of Tau activity, or any combination thereof is reduced in tissue of the brain and/or spinal cord associated with PSP. In some embodiments, tissue associated with AD includes, but is not limited to caudate nucleus, globus pallidus, thalamus, midbrain tegmentum, substantia nigra, pons, cerebellar white matter, cerebellar dentate nucleus, medulla, cervical spinal cord, thoracic spinal cord, and lumbar spinal cord.

[1175] Examples of a disease, disorder, or condition associated with MAPT gene expression include, but are not limited to, AD, FTD, PD, PSP, and Tau protein associated diseases (e.g., primary age-related tauopathy, chronic traumatic encephalopathy, corticobasal degeneration, lytico-bodig disease, ganglioglioma, meningioangiomatosis, postencephalitic parkinsonism, and subacute sclerosing panencephalitis), which have aberrant MAPT gene expression that results in pathology of these diseases. Over 50 missense, silencing, and intronic mutations are known in MAPT (Ghetti et al. (2015) NEUROPATHOL. APPL. NEUROBIOL. 41:24-46) that lead to these diseases.

[1176] Because of their high specificity, the oligonucleotides herein (e.g., RNAi oligonucleotides) specifically target mRNAs of target genes of cells, tissue(s), or organ(s) (e.g., brain). In preventing disease, the target gene may be one that is required for initiation or maintenance of the disease or that has been identified as being associated with a higher risk of contracting the disease. In treating disease, the oligonucleotide can be brought into contact with the cells, tissue(s), or organ(s) (e.g., brain) exhibiting or responsible for mediating the disease. For example, an oligonucleotide substantially identical to all or part of a wild-type (i.e., native) or mutated gene associated with a disorder or condition associated withMAPT gene expression may be brought into contact with or introduced into a cell or tissue type of interest such as an oligodendrocyte or other brain cell.

[1177] In some embodiments, the target gene may be a target gene from any mammal, such as a human. Any gene may be silenced according to the method described herein.

[1178] Methods described herein are typically involve administering to a subject a therapeutically effective amount of an oligonucleotide (e.g., a RNAi oligonucleotide), that is, an amount capable of producing a desirable therapeutic result. A therapeutically acceptable amount may be an amount that can therapeutically treat a disease or disorder. The appropriate dosage for any one subject will depend on certain factors, including the subject's size, body surface area, age, the particular composition to be administered, the active ingredient(s) in the composition, time and route of administration, general health, and other drugs being administered concurrently.

[1179] In some embodiments, a subject is administered any one of the compositions herein either enterally (e.g., orally, by gastric feeding tube, by duodenal feeding tube, via gastrostomy or rectally), parenterally (e.g., subcutaneous injection, intravenous injection or infusion, intra-arterial injection or infusion, intraosseous infusion, intramuscular injection, intracerebral injection, intracerebroventricular injection, or intrathecal), topically (e.g., epicutaneous, inhalational, via eye drops, or through a mucous membrane), or by direct injection into a target organ (e.g., the brain of a subject). Typically, the oligonucleotides are administered intravenously or subcutaneously. In some embodiments, the oligonucleotides are administered to the cerebral spinal fluid. In some embodiments, the oligonucleotides described herein are administered intrathecally. In some embodiments, the oligonucleotides are administered intracerebroventricularly. In some embodiments, the oligonucleotides are administered by intracisternal magna injection.

[1180] As a non-limiting set of examples, the oligonucleotides would typically be administered quarterly (once every three months), bi-monthly (once every two months), monthly or weekly. For example, the oligonucleotides may be administered every week or at intervals of two, or three weeks. Alternatively, the oligonucleotides may be administered daily. In some embodiments, a subject is administered one or more loading doses of the oligonucleotide followed by one or more maintenance doses of the oligonucleotide.

[1181] In some embodiments, the subject to be treated is a human or NUP or other mammalian subject. Other exemplary subjects include domesticated animals such as dogs and cats; livestock such as horses, cattle, pigs, sheep, goats, and chickens; and animals such as mice, rats, guinea pigs, and hamsters.

[1182] Kits

[1183] In some embodiments, the disclosure provides a kit comprising an oligonucleotide herein (e.g., a RNAi oligonucleotide), and instructions for use. In some embodiments, the kit comprises the oligonucleotide and a package insert containing instructions for use of the kit and/or any component thereof. In some embodiments, the kit comprises, in a suitable container, the oligonucleotide, one or more controls, and various buffers, reagents, enzymes and other standard ingredients well known in the art. In some embodiments, the container comprises at least one vial, well, test tube, flask, bottle, syringe, or other container means, into which the oligonucleotide is placed, and in some instances, suitably aliquoted. In some embodiments where an additional component is provided, the kit contains additional containers into which this component is placed. The kits can also include a means for containing the oligonucleotide and any other reagent in close confinement for commercial sale. Such containers may include injection or blow-molded plastic containers into which the desired vials are retained. Containers and/or kits can include labeling with instructions for use and/or warnings.

[1184] In some embodiments, the kit comprises the oligonucleotide and a pharmaceutically acceptable carrier, or a pharmaceutical composition comprising the oligonucleotide and instructions for treating or delaying progression of a disease, disorder or condition associated with MAPT gene expression in a subject in need thereof.

[1185] In some embodiments, the kit comprises the oligonucleotide and a pharmaceutically acceptable carrier or a pharmaceutical composition comprising the oligonucleotide, and instructions for administering the oligonucleotide or pharmaceutical composition to the cerebral spinal fluid to reduce MAPT gene expression in at least one region of the brain and/or at least one region of the spinal cord in a subject in need thereof.

### Definitions

[1186] As used herein, “approximately” or “about,” as applied to one or more values of interest, refers to a value that is similar to a stated reference value. In certain embodiments, “about” refers to a range of values that fall within 25%, 20%, 19%, 18%, 17%, 16%, 15%, 14%, 13%, 12%, 11%, 10%, 9%, 8%, 7%, 6%, 5%, 4%, 3%, 2%, 1% or less in either direction (greater than or less than) of the stated reference value unless otherwise stated or otherwise evident from the context (except where such number would exceed 100% of a possible value).

[1187] As used herein, “administer,” “administering,” “administration” and the like refers to providing a substance (e.g., an oligonucleotide) to a subject in a manner that is pharmacologically useful (e.g., to treat a condition in the subject).

[1188] As used herein, “asialoglycoprotein receptor” or “ASGPR” refers to a bipartite C-type lectin formed by a major 48 kDa subunit (ASGPR-1) and minor 40 kDa subunit (ASGPR-2). ASGPR is primarily expressed on the sinusoidal surface of hepatocyte cells and has a major role in binding, internalizing and subsequent clearing of circulating glycoproteins that contain terminal galactose or GalNAc residues (asialoglycoproteins).

[1189] As used herein, “attenuate,” “attenuating,” “attenuation” and the like refers to reducing or effectively halting. As a non-limiting example, one or more of the treatments herein may reduce or effectively halt the onset or progression of a disease associated with MAPT gene expression (e.g., Tau-associated diseases) in a subject. This attenuation may be exemplified by, for example, a decrease in one or more aspects (e.g., symptoms, tissue characteristics, and cellular, inflammatory or immunological activity, etc.) of a disease associated with MAPT gene expression (e.g., Tau-associated diseases), no detectable progression (worsening) of one or more aspects of the disease, or no detectable aspects of the disease in a subject when they might otherwise be expected.

[1190] As used herein, “complementary” refers to a structural relationship between two nucleotides (e.g., on two opposing nucleic acids or on opposing regions of a single nucleic acid strand) that permits the two nucleotides to form base pairs with one another. For example, a purine nucleotide of one nucleic acid that is complementary to a pyrimidine nucleotide of an opposing nucleic acid may base pair together by forming hydrogen bonds with one another. In some embodiments, complementary nucleotides can base pair in the Watson-Crick manner or in any other manner that allows for the formation of stable duplexes. In some embodiments, two nucleic acids may have regions of multiple nucleotides that are complementary with each other to form regions of complementarity, as described herein.

[1191] As used herein, “deoxyribonucleotide” refers to a nucleotide having a hydrogen in place of a hydroxyl at the 2′ position of its pentose sugar when compared with a ribonucleotide. A modified deoxyribonucleotide is a deoxyribonucleotide having one or more modifications or substitutions of atoms other than at the 2′ position, including modifications or substitutions in or of the sugar, phosphate group or base.

[1192] As used herein, “double-stranded oligonucleotide” or “ds oligonucleotide” refers to an oligonucleotide that is substantially in a duplex form. In some embodiments, the complementary base-pairing of duplex region(s) of a ds oligonucleotide is formed between antiparallel sequences of nucleotides of covalently separate nucleic acid strands. In some embodiments, complementary base-pairing of duplex region(s) of a ds oligonucleotide is formed between antiparallel sequences of nucleotides of nucleic acid strands that are covalently linked. In some embodiments, complementary base-pairing of duplex region(s) of a ds oligonucleotide is formed from single nucleic acid strand that is folded (e.g., via a hairpin) to provide complementary antiparallel sequences of nucleotides that base pair together. In some embodiments, a ds oligonucleotide comprises two covalently separate nucleic acid strands that are fully duplexed with one another. However, in some embodiments, a ds oligonucleotide comprises two covalently separate nucleic acid strands that are partially duplexed (e.g., having overhangs at one or both ends). In some embodiments, a ds oligonucleotide comprises antiparallel sequence of nucleotides that are partially complementary, and thus, may have one or more mismatches, which may include internal mismatches or end mismatches.

[1193] As used herein, “duplex,” in reference to nucleic acids (e.g., oligonucleotides), refers to a structure formed through complementary base pairing of two antiparallel sequences of nucleotides.

[1194] As used herein, “excipient” refers to a non-therapeutic agent that may be included in a composition, for example, to provide or contribute to a desired consistency or stabilizing effect.

[1195] As used herein, “labile linker” refers to a linker that can be cleaved (e.g., by acidic pH). A “fairly stable linker” refers to a linker that cannot be cleaved.

[1196] As used herein, “loop” refers to an unpaired region of a nucleic acid (e.g., oligonucleotide) that is flanked by two antiparallel regions of the nucleic acid that are sufficiently complementary to one another, such that under appropriate hybridization conditions (e.g., in a phosphate buffer, in a cells), the two antiparallel regions, which flank the unpaired region, hybridize to form a duplex (referred to as a “stem”).

[1197] As used herein, “modified internucleotide linkage” refers to an internucleotide linkage having one or more chemical modifications when compared with a reference internucleotide linkage comprising a phosphodiester bond. In some embodiments, a modified nucleotide is a non-naturally occurring linkage. Typically, a modified internucleotide linkage confers one or more desirable properties to a nucleic acid in which the modified internucleotide linkage is present. For example, a modified nucleotide may improve thermal stability, resistance to degradation, nuclease resistance, solubility, bioavailability, bioactivity, reduced immunogenicity, etc.

[1198] As used herein, “modified nucleotide” refers to a nucleotide having one or more chemical modifications when compared with a corresponding reference nucleotide selected from: adenine ribonucleotide, guanine ribonucleotide, cytosine ribonucleotide, uracil ribonucleotide, adenine deoxyribonucleotide, guanine deoxyribonucleotide, cytosine deoxyribonucleotide and thymidine deoxyribonucleotide. In some embodiments, a modified nucleotide is a non-naturally occurring nucleotide. In some embodiments, a modified nucleotide has one or more chemical modification in its sugar, nucleobase and/or phosphate group. In some embodiments, a modified nucleotide has one or more chemical moieties conjugated to a corresponding reference nucleotide. Typically, a modified nucleotide confers one or more desirable properties to a nucleic acid in which the modified nucleotide is present. For example, a modified nucleotide may improve thermal stability, resistance to degradation, nuclease resistance, solubility, bioavailability, bioactivity, reduced immunogenicity, etc.

[1199] As used herein, “nicked tetraloop structure” refers to a structure of an RNAi oligonucleotide that is characterized by separate sense (passenger) and antisense (guide) strands, in which the sense strand has a region of complementarity with the antisense strand, and in which at least one of the strands, generally the sense strand, has a tetraL configured to stabilize an adjacent stem region formed within the at least one strand.

[1200] As used herein, “oligonucleotide” refers to a short nucleic acid (e.g., less than about 100 nucleotides in length). An oligonucleotide may be ss or ds. An oligonucleotide may or may not have duplex regions. As a set of non-limiting examples, an oligonucleotide may be, but is not limited to, a small interfering RNA (siRNA), microRNA (miRNA), short hairpin RNA (shRNA), dicer substrate interfering RNA (dsiRNA), antisense oligonucleotide, short siRNA, or ss siRNA. In some embodiments, a ds oligonucleotide is an RNAi oligonucleotide.

[1201] As used herein, “overhang” refers to terminal non-base pairing nucleotide(s) resulting from one strand or region extending beyond the terminus of a complementary strand with which the one strand or region forms a duplex. In some embodiments, an overhang comprises one or more unpaired nucleotides extending from a duplex region at the 5′ terminus or 3′ terminus of a ds oligonucleotide. In certain embodiments, the overhang is a 3′ or 5′ overhang on the antisense strand or sense strand of a ds oligonucleotides.

[1202] As used herein, “phosphate analog” refers to a chemical moiety that mimics the electrostatic and/or steric properties of a phosphate group. In some embodiments, a phosphate analog is positioned at the 5′ terminal nucleotide of an oligonucleotide in place of a 5′-phosphate, which is often susceptible to enzymatic removal. In some embodiments, a 5′-phosphate analog contains a phosphatase-resistant linkage. Examples of phosphate analogs include, but are not limited to, 5′ phosphonates, such as 5′ methylenephosphonate (5′-MP) and 5′-(E)-vinylphosphonate (5′-VP). In some embodiments, an oligonucleotide has a phosphate analog at a 4′-carbon position of the sugar (referred to as a “4′-phosphate analog”) at a 5′ terminal nucleotide. An example of a 4′-phosphate analog is oxymethylphosphonate, in which the oxygen atom of the oxymethyl group is bound to the sugar moiety (e.g., at its 4′-carbon) or analog thereof. See, e.g., US Provisional Patent Application Nos. 62/383,207 (filed on 2 Sep. 2016) and 62/393,401 (filed on 12 Sep. 2016). Other modifications have been developed for the 5′ end of oligonucleotides (see, e.g., Intl. Patent Application Publication No. WO 2011/133871; U.S. Pat. No. 8,927,513; and Prakash et al. (2015) NUCLEIC ACIDS RES. 43:2993-3011).

[1203] As used herein, “MAPT” refers to Microtubule-Associated Protein Tau. The MAPT transcript undergoes several types of alternative splicing to produce different mRNA species and Tau proteins. There are six known Tau isoforms produced by the splicing of MAPT mRNA. MAPT gene expression is found primarily in the axons of neurons in the CNS. Tau protein interacts with tubulin to generate microtubules which are involved in several cellular processes. The MAPT mRNA encoding wild-type human Tau protein is set forth in SEQ ID NO: 909. The MAPT mRNA encoding mouse Tau protein is set forth in SEQ ID NO: 910. The MAPT mRNA encoding monkey Tau protein is set forth in SEQ ID NO: 911. One of skill in the art, however, understands that additional examples of MAPT mRNA sequences are readily available using publicly available databases such as, for example, GenBank and UniProt.

[1204] As used herein, “reduced expression” of a gene (e.g., MAPT) refers to a decrease in the amount or level of RNA transcript (e.g., MAPT mRNA) or protein encoded by the gene and/or a decrease in the amount or level of activity of the gene in a cell, a population of cells, a sample or a subject, when compared to an appropriate reference (e.g., a reference cell, population of cells, sample, or subject). For example, the act of contacting a cell with an oligonucleotide herein (e.g., an oligonucleotide comprising an antisense strand having a nucleotide sequence that is complementary to a nucleotide sequence comprising MAPT mRNA) may result in a decrease in the amount or level of MAPT mRNA, Tau protein, and/or Tau activity (e.g., via inactivation and/or degradation of MAPT mRNA by the RNAi pathway) when compared to a cell that is not treated with the ds oligonucleotide. Similarly, and as used herein, “reducing expression” refers to an act that results in reduced expression of a gene (e.g., MAPT).

[1205] As used herein, “reduction of MAPT gene expression” refers to a decrease in the amount or level of MAPT mRNA, Tau protein, and/or Tau activity in a cell, a population of cells, a sample, or a subject when compared to an appropriate reference (e.g., a reference cell, population of cells, sample, or subject).

[1206] As used herein, “region of complementarity” refers to a sequence of nucleotides of a nucleic acid (e.g., a ds oligonucleotide) that is sufficiently complementary to an antiparallel sequence of nucleotides to permit hybridization between the two sequences of nucleotides under appropriate hybridization conditions (e.g., in a phosphate buffer, in a cell, etc.). In some embodiments, an oligonucleotide herein comprises a targeting sequence having a region of complementary to a mRNA target sequence.

[1207] As used herein, “ribonucleotide” refers to a nucleotide having a ribose as its pentose sugar, which contains a hydroxyl group at its 2′ position. A modified ribonucleotide is a ribonucleotide having one or more modifications or substitutions of atoms other than at the 2′ position, including modifications or substitutions in or of the ribose, phosphate group or base.

[1208] As used herein, “RNAi oligonucleotide” refers to either (a) a ds oligonucleotide having a sense strand (passenger) and antisense strand (guide), in which the antisense strand or part of the antisense strand is used by the Argonaute 2 (Ago2) endonuclease in the cleavage of a target mRNA (e.g., MAPT mRNA) or (b) a ss oligonucleotide having a single antisense strand, where that antisense strand (or part of that antisense strand) is used by the Ago2 endonuclease in the cleavage of a target mRNA (e.g., MAPT mRNA).

[1209] As used herein, “strand” refers to a single, contiguous sequence of nucleotides linked together through internucleotide linkages (e.g., phosphodiester linkages or phosphorothioate linkages). In some embodiments, a strand has two free ends (e.g., a 5′ end and a 3′ end).

[1210] As used herein, “subject” means any mammal, including mice, rabbits, and humans. In one embodiment, the subject is a human or NUP. Moreover, “individual” or “patient” may be used interchangeably with “subject.”

[1211] As used herein, “synthetic” refers to a nucleic acid or other molecule that is artificially synthesized (e.g., using a machine (e.g., a solid-state nucleic acid synthesizer)) or that is otherwise not derived from a natural source (e.g., a cell or organism) that normally produces the molecule.

[1212] As used herein, “targeting ligand” refers to a molecule (e.g., a carbohydrate, amino sugar, cholesterol, or polypeptide) that selectively binds to a cognate molecule (e.g., a receptor) of a tissue or cell of interest and that is conjugatable to another substance for purposes of targeting the other substance to the tissue or cell of interest. For example, in some embodiments, a targeting ligand may be conjugated to an oligonucleotide for purposes of targeting the oligonucleotide to a specific tissue or cell of interest. In some embodiments, a targeting ligand selectively binds to a cell surface receptor. Accordingly, in some embodiments, a targeting ligand when conjugated to an oligonucleotide facilitates delivery of the oligonucleotide into a particular cell through selective binding to a receptor expressed on the surface of the cell and endosomal internalization by the cell of the complex comprising the oligonucleotide, targeting ligand and receptor. In some embodiments, a targeting ligand is conjugated to an oligonucleotide via a linker that is cleaved following or during cellular internalization such that the oligonucleotide is released from the targeting ligand in the cell.

[1213] As used herein, “tetraloop” or “tetraL” refers to a loop that increases stability of an adjacent duplex formed by hybridization of flanking sequences of nucleotides. The increase in stability is detectable as an increase in melting temperature (Tₘ) of an adjacent stem duplex that is higher than the Tₘ of the adjacent stem duplex expected, on average, from a set of loops of comparable length consisting of randomly selected sequences of nucleotides. For example, a tetraL can confer a Tₘ of at least about 50° C., at least about 55° C., at least about 56° C., at least about 58° C., at least about 60° C., at least about 65° C. or at least about 75° C. in 10 mM NaIPO₄ to a hairpin comprising a duplex of at least 2 base pairs (bp) in length. In some embodiments, a tetraL may stabilize a bp in an adjacent stem duplex by stacking interactions. In addition, interactions among the nucleotides in a tetraL include, but are not limited to, non-Watson-Crick base pairing, stacking interactions, hydrogen bonding and contact interactions (Cheong et al. (1990) NATURE 346:680-682; Heus & Pardi (1991) SCIENCE 253:191-94). In some embodiments, a tetraL comprises or consists of 3 to 6 nucleotides and is typically 4 to 5 nucleotides. In certain embodiments, a tetraL comprises or consists of 3, 4, 5, or 6 nucleotides, which may or may not be modified (e.g., which may or may not be conjugated to a targeting moiety). In certain embodiments, a tetraL comprises or consists of 3, 4, 5, or 6 nucleotides, which may or may not be modified (e.g., which may or may not be conjugated to a targeting ligand). In one embodiment, a tetraL consists of 4 nucleotides. Any nucleotide may be used in the tetraloop and standard IUPAC-IUB symbols for such nucleotides may be used as described in Cornish-Bowden (1985) NUCLEIC ACIDS RES. 13:3021-30. For example, the letter “N” may be used to mean that any base may be in that position, the letter “R” may be used to show that A (adenine) or G (guanine) may be in that position, and “B” may be used to show that C (cytosine), G (guanine), T (thymine) or U (uracil) may be in that position. Examples of tetraLs include the UNCG family of tetraLs (e.g., UUCG), the GNRA family of tetraLs (e.g., GAAA), and the CUUG tetraloop (Woese et al. (1990) PROC. NATL. ACAD. SCI. USA 87:8467-71; Antao et al. (1991) NUCLEIC ACIDS RES. 19:5901-05). Examples of DNA tetraLs include the d(GNNA) family of tetraLs (e.g., d(GTTA), the d(GNRA)) family of tetraLs, the d(GNAB) family of tetraLs, the d(CNNG) family of tetraLs, and the d(TNCG) family of tetraLs (e.g., d(TTCG)). See, e.g., Nakano et al. (2002) BIOCHEM. 41:4281-92; Shinji et al. (2000) NIPPON KAGAKKAI KOEN YOKOSHU 78:731. In some embodiments, the tetraloop is contained within a nicked tetraL structure.

[1214] As used herein, “treat” or “treating” refers to the act of providing care to a subject in need thereof, for example, by administering a therapeutic agent (e.g., an oligonucleotide herein) to the subject, for purposes of improving the health and/or well-being of the subject with respect to an existing condition (e.g., a disease, disorder) or to prevent or decrease the likelihood of the occurrence of a condition. In some embodiments, treatment involves reducing the frequency or severity of at least one sign, symptom, or contributing factor of a condition (e.g., disease or disorder) experienced by a subject.

### EXAMPLES

[1215] The following non-limiting examples are offered for purposes of illustration, not limitation.

### Example 1: Preparation of RNAi Oligonucleotides

[1216] Oligonucleotide Synthesis and Purification

[1217] The oligonucleotides (RNAi oligonucleotides) described in the foregoing Examples are chemically synthesized using methods described herein. Generally, RNAi oligonucleotides are synthesized using solid phase oligonucleotide synthesis methods as described for 19-23mer siRNAs (see, e.g., Scaringe et al. (1990) NUCLEIC ACIDS RES. 18:5433-5441 and Usman et al. (1987) J. AM. CHEM. SOC. 109:7845-45; see also, U.S. Pat. Nos. 5,804,683; 5,831,071; 5,998,203; 6,008,400; 6,111,086; 6,117,657; 6,353,098; 6,362,323; 6,437,117 and 6,469,158) in addition to using known phosphoramidite synthesis (see, e.g. Hughes & Ellington (2017) COLD SPRING HARB. PERSPECT. BIOL. 9(1):a023812; Beaucage & Caruthers (1981) TETRAHEDRON LETT. 22:1859-62). dsRNAi oligonucleotides have a 19mer core sequence were formatted into constructs having a 25mer sense strand and a 27mer antisense strand to allow for processing by the RNAi machinery. The 19mer core sequence is complementary to a region in the MAPT mRNA.

[1218] Individual RNA strands were synthesized and HPLC purified according to standard methods (Integrated DNA Technologies). For example, RNA oligonucleotides were synthesized using solid phase phosphoramidite chemistry, deprotected, and desalted on NAP-5 columns (Amersham Pharmacia Biotech) using standard techniques (Damha & Olgivie (1993) METHODS MOL. BIOL. 20:81-114; Wincott et al. (1995) NUCLEIC ACIDS RES. 23:2677-84). The oligomers were purified using ion-exchange high performance liquid chromatography (IE-HPLC) on an Amersham Source 15Q column (1.0 cm×25 cm; Amersham Pharmacia Biotech) using a 15 min step-linear gradient. The gradient varied from 90:10 Buffers A:B to 52:48 Buffers A:B, where Buffer A is 100 mM Tris pH 8.5 and Buffer B is 100 mM Tris pH 8.5, 1 M NaCl. Samples were monitored at 260 nm and peaks corresponding to the full-length oligonucleotide species were collected, pooled, desalted on NAP-5 columns, and lyophilized.

[1219] The purity of each oligomer was determined by capillary electrophoresis (CE) on a Beckman PACE 5000 (Beckman Coulter, Inc.). The CE capillaries have a 100 m inner diameter and contain ssDNA 100R Gel (Beckman-Coulter). Typically, about 0.6 nmole of oligonucleotide was injected into a capillary, run in an electric field of 444 V/cm, and was detected by UV absorbance at 260 nm. Denaturing Tris-Borate-7 M-urea running buffer was purchased from Beckman-Coulter. Oligoribonucleotides were obtained that were at least 90% pure as assessed by CE for use in experiments described below. Compound identity was verified by matrix-assisted laser desorption ionization time-of-flight (MALDI-TOF) mass spectroscopy on a Voyager DE™ Biospectometry Work Station (Applied Biosystems) following the manufacturer's recommended protocol. Relative molecular masses of all oligomers were obtained, often within 0.2% of expected molecular mass.

[1220] Preparation of Duplexes

[1221] ss RNA oligomers were resuspended (e.g., at 100 μM concentration) in duplex buffer consisting of 100 mM potassium acetate, 30 mM HEPES, pH 7.5. Complementary sense and antisense strands were mixed in equal molar amounts to yield a final solution of, for example, 50 M duplex. Samples were heated to 100° C. for 5 min in RNA buffer (IDT) and were allowed to cool to room temperature before use. The RNAi oligonucleotides were stored at −20° C. ss RNA oligomers were stored lyophilized or in nuclease-free water at −80° C.

### Example 2: Generation of MAPT-Targeting ds RNAi Oligonucleotides

[1222] Identification of MAPT mRNA Target Sequences

[1223] To generate MAPT-targeting RNAi oligonucleotides, a computer-based algorithm was used to computationally identify MAPT mRNA target sequences suitable for assaying inhibition of MAPT gene expression by the RNAi pathway. The algorithm provided RNAi oligonucleotide antisense (guide) strand sequences each having a region of complementarity to a suitable MAPT mRNA target sequence of human (Hs) or murine (Mm) mRNA (e.g., SEQ ID NOs: 909 and 910, respectively; Table 1). Due to sequence conservation across species, some of the MAPT mRNA target sequences identified for human MAPT mRNA are homologous to the corresponding MAPT mRNA target sequence of murine (mM) MAPT mRNA (SEQ ID NO: 910; Table 1) and/or monkey (Mf) MAPT mRNA (SEQ ID NO: 911; Table 1). MAPT-targeting RNAi oligonucleotides comprising a region of complementarity to homologous MAPT mRNA target sequences with nucleotide sequence similarity are predicted to have the ability to target homologous MAPT mRNAs (e.g., human and monkey MAPT mRNAs).

TABLE 1
Exemplary Human, Monkey, and
Mouse MAPT mRNA Sequences.

| Species | GenBank Ref Seq # | SEQ ID NO |
|---|---|---|
| Human (Hs) | NM_001123066.3 | 909 |
| Mouse (Mm) | NM_001038609.02 | 910 |
| Cynomolgus monkey (Mf) | XM_005584531.2 | 911 |

[1224] RNAi oligonucleotides (formatted as DsiRNA oligonucleotides) were generated as described in Example 1 for evaluation in vitro. Each DsiRNA was generated with the same modification pattern, and each with a unique guide strand having a region of complementarity to a MAPT target sequence identified by the algorithm. Modifications for the sense and antisense DsiRNA included the following (X—any nucleotide; m—2′-OMe-modified nucleotide; r—ribosyl-modified nucleotide):

Sense Strand:
rXmXrXmXrXrXrXrXrXrXrXrXrXmXrXmXrXrXrXrXrXrXrXXX
Anti-sense Strand:
mXmXmXmXrXrXrXrXrXrXmXrXmXrXrXrXrXrXrXrXrXrXmXrXmX
mXmX

[1225] In Vitro Cell-Based Assays

[1226] The ability of each of the modified DsiRNA in Table 2 to reduce MAPT mRNA was measured using in vitro cell-based assays. Briefly, human T98G cells (glioblastoma cell line) expressing endogenous human MAPT gene were transfected with each of the DsiRNAs listed in Table 2 at 1 nM in separate wells of a multi-well cell-culture plate. Cells were maintained for 24 hours following transfection with the modified DsiRNA, and then the amount of remaining MAPT mRNA from the transfected cells was determined using TAQMAN®-based qPCR assays. Two qPCR assays, a 3′ assay (Forward; GAA GAT TGG GTC CCT GGA (SEQ ID NO: 1683), Reverse; TGT CTT GGC TTT GGC GTT (SEQ ID NO: 1684), Probe; 5′-6FAM-CGG AAG GTC/ZEN/AGC TTG TGG GTT TCA (SEQ ID NO: 1685); and a 5′ assay (Forward; CAC CAC AGC CAC CTT CTC (SEQ ID NO: 1686), Reverse; CTT CCA TCA CTT CGA ACT CCT (SEQ ID NO: 1687), Probe; 5′-6FAM-CGT CCT CGC/ZEN/CTC TGT CGA CTA (SEQ ID NO: 1688) were used to determine MAPT mRNA levels as measured using PCR probes conjugated to 6-carboxy-fluorescein (FAM). Primer pairs were assayed for % remaining mRNA as shown in Table 2. DsiRNAs resulting in less than or equal to 10% MAPT mRNA remaining in DsiRNA-transfected cells when compared to mock-transfected cells were considered DsiRNA “hits.” The T98G cell-based assay evaluating the ability of the DsiRNAs listed in Table 2 to inhibit MAPT gene expression identified several candidate DsiRNAs.

[1227] Taken together, these results show that DsiRNAs designed to target human MAPT mRNA inhibit MAPT gene expression in cells, as determined by a reduced amount of MAPT mRNA in DsiRNA-transfected cells relative to control cells. These results demonstrate that the nucleotide sequences comprising the DsiRNA are useful for generating RNAi oligonucleotides to inhibit MAPT gene expression. Further, these results demonstrate that multiple MAPT mRNA target sequences are suitable for the RNAi-mediated inhibition of MAPT gene expression.

TABLE 2
In Vitro Screening Results.

| | | Anti- | | | | | | |
|---|---|---|---|---|---|---|---|---|
| | Sense | sense | | | | | | |
| | strand | strand | | | HsMAPT- | | HsMAPT- | |
| | SEQ | SEQ | 1 nM; T98G Cells | | 5′/SFRS9-F569 | | 3′/HPRT1-F517 | |
| | ID | ID | average % | | % | | % | |
| Construct | NO | NO | remaining | average SD | remaining | SEM | remaining | SEM |
| MAPT- | 1 | 385 | 95.01 | 25.6510056 | 76.872 | 12.015 | 113.148 | 14.537 |
| 2141 | | | | | | | | |
| MAPT- | 2 | 386 | 45.0915 | 14.8556064 | 34.587 | 3.412 | 55.596 | 5.956 |
| 2142 | | | | | | | | |
| MAPT- | 3 | 387 | 49.649 | 1.54149278 | 48.559 | 4.694 | 50.739 | 7.759 |
| 2303 | | | | | | | | |
| MAPT- | 4 | 388 | 14.9465 | 2.79802153 | 16.925 | 2.294 | 12.968 | 2.03 |
| 2347 | | | | | | | | |
| MAPT- | 5 | 389 | 36.102 | 6.40497322 | 40.631 | 12.81 | 31.573 | 8.578 |
| 2349 | | | | | | | | |
| MAPT- | 6 | 390 | 40.698 | 0.85701342 | 40.092 | 7.14 | 41.304 | 6.668 |
| 2350 | | | | | | | | |
| MAPT- | 7 | 391 | 34.233 | 1.88514668 | 35.566 | 7.156 | 32.9 | 12.834 |
| 2351 | | | | | | | | |
| MAPT- | 8 | 392 | 18.5755 | 5.96161727 | 22.791 | 7.452 | 14.36 | 4.732 |
| 2352 | | | | | | | | |
| MAPT- | 9 | 393 | 48.36 | 11.8822224 | 39.958 | 4.633 | 56.762 | 6.089 |
| 2353 | | | | | | | | |
| MAPT- | 10 | 394 | 24.094 | 3.67271262 | 26.691 | 5.688 | 21.497 | 6.358 |
| 2354 | | | | | | | | |
| MAPT- | 11 | 395 | 18.7485 | 3.90252233 | 21.508 | 3.374 | 15.989 | 2.482 |
| 2355 | | | | | | | | |
| MAPT- | 12 | 396 | 14.572 | 3.86645988 | 17.306 | 5.142 | 11.838 | 2.977 |
| 2459 | | | | | | | | |
| MAPT- | 13 | 397 | 13.041 | 4.14647416 | 15.973 | 2.64 | 10.109 | 1.577 |
| 2460 | | | | | | | | |
| MAPT- | 14 | 398 | 16.537 | 3.28097546 | 14.217 | 6.702 | 18.857 | 2.975 |
| 2461 | | | | | | | | |
| MAPT- | 15 | 399 | 21.8695 | 2.158797 | 23.396 | 6.242 | 20.343 | 6.622 |
| 2462 | | | | | | | | |
| MAPT- | 16 | 400 | 36.615 | 1.28127749 | 35.709 | 11 | 37.521 | 8.285 |
| 2463 | | | | | | | | |
| MAPT- | 17 | 401 | 24.302 | 4.31335137 | 21.252 | 4.336 | 27.352 | 3.33 |
| 2464 | | | | | | | | |
| MAPT- | 18 | 402 | 57.3185 | 24.0494087 | 40.313 | 6.657 | 74.324 | 8.436 |
| 2465 | | | | | | | | |
| MAPT- | 19 | 403 | 43.9035 | 1.65109433 | 42.736 | 8.925 | 45.071 | 6.344 |
| 2466 | | | | | | | | |
| MAPT- | 20 | 404 | 42.107 | 27.9957717 | 22.311 | 4.822 | 61.903 | 9.046 |
| 2467 | | | | | | | | |
| MAPT- | 21 | 405 | 38.319 | 5.58472936 | 34.37 | 10.991 | 42.268 | 9.76 |
| 2495 | | | | | | | | |
| MAPT- | 22 | 406 | 24.6465 | 2.92105811 | 26.712 | 4.387 | 22.581 | 6.794 |
| 2496 | | | | | | | | |
| MAPT- | 23 | 407 | 82.684 | 13.0956176 | 73.424 | 15.054 | 91.944 | 13.074 |
| 3686 | | | | | | | | |
| MAPT- | 24 | 408 | 55.0335 | 15.0691526 | 65.689 | 6.468 | 44.378 | 10.238 |
| 3687 | | | | | | | | |
| MAPT- | 25 | 409 | 87.266 | 1.77200959 | 88.519 | 15.089 | 86.013 | 15.763 |
| 3688 | | | | | | | | |
| MAPT- | 26 | 410 | 44.8115 | 4.63932759 | 48.092 | 12.584 | 41.531 | 10.617 |
| 3691 | | | | | | | | |
| MAPT- | 27 | 411 | 42.868 | 1.70412734 | 41.663 | 6.449 | 44.073 | 5.791 |
| 3692 | | | | | | | | |
| MAPT- | 28 | 412 | 49.581 | 11.071878 | 41.752 | 5.802 | 57.41 | 8.211 |
| 3693 | | | | | | | | |
| MAPT- | 29 | 413 | 47.3565 | 11.3016877 | 39.365 | 3.71 | 55.348 | 6.574 |
| 4534 | | | | | | | | |
| MAPT- | 30 | 414 | 56.0275 | 17.8608102 | 43.398 | 5.409 | 68.657 | 9.992 |
| 4535 | | | | | | | | |
| MAPT- | 31 | 415 | 62.025 | 10.3096169 | 54.735 | 7.123 | 69.315 | 12.404 |
| 4536 | | | | | | | | |
| MAPT- | 32 | 416 | 38.464 | 6.65811745 | 43.172 | 7.528 | 33.756 | 11.817 |
| 4537 | | | | | | | | |
| MAPT- | 33 | 417 | 44.9465 | 13.5743289 | 35.348 | 11.081 | 54.545 | 9.032 |
| 4538 | | | | | | | | |
| MAPT- | 34 | 418 | 38.0325 | 1.6058395 | 36.897 | 10.035 | 39.168 | 10.49 |
| 4566 | | | | | | | | |
| MAPT- | 35 | 419 | 40.872 | 8.78650886 | 34.659 | 6.539 | 47.085 | 6.222 |
| 4567 | | | | | | | | |
| MAPT- | 36 | 420 | 39.4745 | 0.77428193 | 40.022 | 6.35 | 38.927 | 3.497 |
| 4568 | | | | | | | | |
| MAPT- | 37 | 421 | 44.188 | 6.29183614 | 39.739 | 5.336 | 48.637 | 6.198 |
| 4569 | | | | | | | | |
| MAPT- | 38 | 422 | 52.8135 | 22.3947789 | 36.978 | 7.769 | 68.649 | 12.743 |
| 4570 | | | | | | | | |
| MAPT- | 39 | 423 | 50.4355 | 6.61639815 | 45.757 | 6.03 | 55.114 | 10.233 |
| 4571 | | | | | | | | |
| MAPT- | 40 | 424 | 51.2905 | 5.50765472 | 47.396 | 8.8 | 55.185 | 7.514 |
| 4572 | | | | | | | | |
| MAPT- | 41 | 425 | 41.6435 | 3.91100761 | 44.409 | 11.822 | 38.878 | 5.955 |
| 4573 | | | | | | | | |
| MAPT- | 42 | 426 | 44.6415 | 3.87140963 | 47.379 | 14.765 | 41.904 | 17.629 |
| 4574 | | | | | | | | |
| MAPT- | 43 | 427 | 43.044 | 4.46184379 | 39.889 | 4.461 | 46.199 | 6.498 |
| 4575 | | | | | | | | |
| MAPT- | 44 | 428 | 35.613 | 5.81100353 | 31.504 | 2.99 | 39.722 | 6.824 |
| 4576 | | | | | | | | |
| MAPT- | 45 | 429 | 32.979 | 3.62462936 | 35.542 | 4.01 | 30.416 | 7.004 |
| 4577 | | | | | | | | |
| MAPT- | 46 | 430 | 59.0835 | 11.5053344 | 50.948 | 8.8 | 67.219 | 11.491 |
| 4578 | | | | | | | | |
| MAPT- | 47 | 431 | 44.268 | 11.4565441 | 36.167 | 4.845 | 52.369 | 5.65 |
| 4579 | | | | | | | | |
| MAPT- | 48 | 432 | 57.2225 | 22.8713688 | 41.05 | 10.952 | 73.395 | 8.852 |
| 4580 | | | | | | | | |
| MAPT- | 49 | 433 | 96.059 | 3.22440692 | 93.779 | 15.189 | 98.339 | 15.945 |
| 4605 | | | | | | | | |
| MAPT- | 50 | 434 | 57.348 | 2.49467272 | 59.112 | 13.383 | 55.584 | 9.058 |
| 4606 | | | | | | | | |
| MAPT- | 51 | 435 | 67.9825 | 13.5799857 | 58.38 | 10.161 | 77.585 | 9.466 |
| 4607 | | | | | | | | |
| MAPT- | 52 | 436 | 35.004 | 14.4589195 | 45.228 | 5.369 | 24.78 | 7.968 |
| 4608 | | | | | | | | |
| MAPT- | 53 | 437 | 52.854 | 7.33552575 | 58.041 | 9.122 | 47.667 | 6.181 |
| 4609 | | | | | | | | |
| MAPT- | 54 | 438 | 56.244 | 5.2764308 | 52.513 | 8.718 | 59.975 | 11.85 |
| 4610 | | | | | | | | |
| MAPT- | 55 | 439 | 60.552 | 13.7489843 | 70.274 | 19.308 | 50.83 | 9.512 |
| 4611 | | | | | | | | |
| MAPT- | 56 | 440 | 44.801 | 10.820148 | 37.15 | 9.793 | 52.452 | 16.948 |
| 4612 | | | | | | | | |
| MAPT- | 57 | 441 | 55.2605 | 12.1374879 | 46.678 | 13.942 | 63.843 | 4.47 |
| 4613 | | | | | | | | |
| MAPT- | 58 | 442 | 51.7385 | 24.0451661 | 68.741 | 10.458 | 34.736 | 6.591 |
| 4614 | | | | | | | | |
| MAPT- | 59 | 443 | 47.4125 | 3.24915566 | 45.115 | 14.811 | 49.71 | 8.998 |
| 5969 | | | | | | | | |
| MAPT- | 60 | 444 | 44.3725 | 3.58998113 | 41.834 | 5.855 | 46.911 | 3.033 |
| 5970 | | | | | | | | |
| MAPT- | 61 | 445 | 63.7505 | 23.6336299 | 47.039 | 6.803 | 80.462 | 9.959 |
| 5971 | | | | | | | | |
| MAPT- | 62 | 446 | 49.5005 | 23.8089924 | 32.665 | 4.895 | 66.336 | 6.085 |
| 5972 | | | | | | | | |
| MAPT- | 63 | 447 | 52.079 | 7.14884956 | 57.134 | 10.719 | 47.024 | 8.743 |
| 5973 | | | | | | | | |
| MAPT- | 64 | 448 | 44.9585 | 12.1686006 | 36.354 | 12.432 | 53.563 | 8.866 |
| 5974 | | | | | | | | |
| MAPT- | 65 | 449 | 45.1555 | 0.32456201 | 45.385 | 9.699 | 44.926 | 10.859 |
| 5975 | | | | | | | | |
| MAPT- | 66 | 450 | 43.056 | 1.32511811 | 43.993 | 18.502 | 42.119 | 5.098 |
| 5976 | | | | | | | | |
| MAPT- | 67 | 451 | 47.3185 | 1.16319066 | 48.141 | 6.434 | 46.496 | 7.198 |
| 5977 | | | | | | | | |
| MAPT- | 68 | 452 | 58.9385 | 3.69887557 | 56.323 | 8.866 | 61.554 | 8.153 |
| 5978 | | | | | | | | |
| MAPT- | 69 | 453 | 90.251 | 49.5568717 | 55.209 | 23.067 | 125.293 | 41.072 |
| 5979 | | | | | | | | |
| MAPT- | 70 | 454 | 93.5025 | 1.75433192 | 92.262 | 15.249 | 94.743 | 12.851 |
| 5980 | | | | | | | | |
| MAPT- | 71 | 455 | 73.614 | 15.0401612 | 62.979 | 9.331 | 84.249 | 10.224 |
| 5981 | | | | | | | | |
| MAPT- | 72 | 456 | 52.7605 | 4.23627673 | 55.756 | 7.219 | 49.765 | 6.897 |
| 5982 | | | | | | | | |
| MAPT- | 73 | 457 | 52.0305 | 13.3805816 | 61.492 | 16.873 | 42.569 | 15.962 |
| 5983 | | | | | | | | |
| MAPT- | 74 | 458 | 39.226 | 13.1267303 | 29.944 | 8.671 | 48.508 | 18.496 |
| 5984 | | | | | | | | |
| MAPT- | 75 | 459 | 47.514 | 0.09475231 | 47.581 | 10.955 | 47.447 | 15.502 |
| 5985 | | | | | | | | |
| MAPT- | 76 | 460 | 56.8945 | 5.52321107 | 52.989 | 23.098 | 60.8 | 21.716 |
| 6662 | | | | | | | | |
| MAPT- | 77 | 461 | 50.6 | 16.8984379 | 38.651 | 7.897 | 62.549 | 14.03 |
| 6663 | | | | | | | | |
| MAPT- | 78 | 462 | 59.894 | 1.37461558 | 60.866 | 17.793 | 58.922 | 20.062 |
| 6664 | | | | | | | | |
| MAPT- | 79 | 463 | 45.514 | 6.31022092 | 49.976 | 19.816 | 41.052 | 16.434 |
| 6665 | | | | | | | | |
| MAPT- | 80 | 464 | 49.963 | 1.58391919 | 51.083 | 13.407 | 48.843 | 10.693 |
| 6800 | | | | | | | | |
| MAPT- | 81 | 465 | 78.6545 | 21.2761359 | 63.61 | 10.347 | 93.699 | 12.651 |
| 6801 | | | | | | | | |
| MAPT- | 82 | 466 | 36.959 | 2.8468119 | 34.946 | 11.719 | 38.972 | 6.592 |
| 6802 | | | | | | | | |
| MAPT- | 83 | 467 | 60.1565 | 7.48896792 | 54.861 | 6.209 | 65.452 | 7.341 |
| 6803 | | | | | | | | |
| MAPT- | 84 | 468 | 58.1295 | 25.573931 | 40.046 | 7.718 | 76.213 | 14.881 |
| 6804 | | | | | | | | |
| MAPT- | 85 | 469 | 40.6695 | 7.0180348 | 35.707 | 8.81 | 45.632 | 6.173 |
| 6805 | | | | | | | | |
| MAPT- | 86 | 470 | 49.47 | 9.29421153 | 42.898 | 13.633 | 56.042 | 8.573 |
| 6806 | | | | | | | | |
| MAPT- | 87 | 471 | 44.6315 | 14.4172002 | 34.437 | 12.547 | 54.826 | 14.094 |
| 6807 | | | | | | | | |
| MAPT- | 88 | 472 | 47.8265 | 1.73311872 | 46.601 | 15.127 | 49.052 | 9.845 |
| 6808 | | | | | | | | |
| MAPT- | 89 | 473 | 100.4455 | 12.3199214 | 91.734 | 32.653 | 109.157 | 62.617 |
| 6809 | | | | | | | | |
| MAPT- | 90 | 474 | 38.2355 | 5.25168206 | 34.522 | 8.787 | 41.949 | 19.197 |
| 6810 | | | | | | | | |
| MAPT- | 91 | 475 | 64.862 | 2.72801796 | 66.791 | 6.959 | 62.933 | 10.212 |
| 6811 | | | | | | | | |
| MAPT- | 92 | 476 | 78.776 | 32.6782328 | 55.669 | 16.433 | 101.883 | 16.548 |
| 6812 | | | | | | | | |
| MAPT- | 93 | 477 | 67.15 | 7.39068008 | 61.924 | 11.954 | 72.376 | 13.616 |
| 6813 | | | | | | | | |
| MAPT- | 94 | 478 | 44.55 | 0.562857 | 44.152 | 9.142 | 44.948 | 5.743 |
| 6814 | | | | | | | | |
| MAPT- | 95 | 479 | 72.563 | 12.5695301 | 63.675 | 13.171 | 81.451 | 15.732 |
| 6815 | | | | | | | | |
| MAPT- | 96 | 480 | 42.662 | 7.06258253 | 37.668 | 7.799 | 47.656 | 9.971 |
| 6816 | | | | | | | | |
| MAPT- | 97 | 481 | 10.801 | 0.99843478 | 11.507 | 5.145 | 10.095 | 2.3 |
| 363 | | | | | | | | |
| MAPT- | 98 | 482 | 17.493 | 1.23319423 | 18.365 | 8.672 | 16.621 | 3.855 |
| 364 | | | | | | | | |
| MAPT- | 99 | 483 | 49.6115 | 18.8917719 | 36.253 | 12.86 | 62.97 | 12.877 |
| 365 | | | | | | | | |
| MAPT- | 100 | 484 | 60.2915 | 5.79898271 | 64.392 | 9.598 | 56.191 | 8.387 |
| 367 | | | | | | | | |
| MAPT- | 101 | 485 | 18.496 | 5.14349473 | 14.859 | 2.908 | 22.133 | 5.121 |
| 369 | | | | | | | | |
| MAPT- | 102 | 486 | 54.2605 | 7.24855161 | 49.135 | 6.979 | 59.386 | 8.929 |
| 374 | | | | | | | | |
| MAPT- | 103 | 487 | 29.862 | 11.7125167 | 38.144 | 8.293 | 21.58 | 5.252 |
| 395 | | | | | | | | |
| MAPT- | 104 | 488 | 34.402 | 16.4246763 | 22.788 | 7.436 | 46.016 | 11.445 |
| 400 | | | | | | | | |
| MAPT- | 105 | 489 | 17.7005 | 6.73802052 | 12.936 | 4.852 | 22.465 | 4.318 |
| 443 | | | | | | | | |
| MAPT- | 106 | 490 | 62.8045 | 3.40047651 | 65.209 | 13.424 | 60.4 | 5.794 |
| 688 | | | | | | | | |
| MAPT- | 107 | 491 | 26.4395 | 3.02853834 | 28.581 | 4.295 | 24.298 | 6.236 |
| 689 | | | | | | | | |
| MAPT- | 108 | 492 | 14.6445 | 4.81327586 | 11.241 | 2.659 | 18.048 | 2.561 |
| 690 | | | | | | | | |
| MAPT- | 109 | 493 | 63.3205 | 15.4368481 | 52.405 | 6.513 | 74.236 | 8.881 |
| 693 | | | | | | | | |
| MAPT- | 110 | 494 | 116.4165 | 9.93838581 | 123.444 | 17.981 | 109.389 | 37.256 |
| 695 | | | | | | | | |
| MAPT- | 111 | 495 | 31.593 | 2.7322606 | 33.525 | 9.92 | 29.661 | 8.245 |
| 696 | | | | | | | | |
| MAPT- | 112 | 496 | 26.2465 | 9.29491864 | 19.674 | 5.59 | 32.819 | 7.787 |
| 1475 | | | | | | | | |
| MAPT- | 113 | 497 | 30.5425 | 1.07975205 | 29.779 | 5.507 | 31.306 | 6.256 |
| 1476 | | | | | | | | |
| MAPT- | 114 | 498 | 13.127 | 0.9588368 | 13.805 | 1.935 | 12.449 | 2.983 |
| 1479 | | | | | | | | |
| MAPT- | 115 | 499 | 47.5765 | 5.71554411 | 43.535 | 9.405 | 51.618 | 7.164 |
| 1480 | | | | | | | | |
| MAPT- | 116 | 500 | 37.489 | 3.0349023 | 39.635 | 3.962 | 35.343 | 5.214 |
| 1481 | | | | | | | | |
| MAPT- | 117 | 501 | 24.0215 | 8.67690731 | 17.886 | 3.238 | 30.157 | 3.712 |
| 1484 | | | | | | | | |
| MAPT- | 118 | 502 | 55.319 | 27.0807755 | 36.17 | 8.411 | 74.468 | 21.392 |
| 1485 | | | | | | | | |
| MAPT- | 119 | 503 | 77.784 | 20.2685088 | 63.452 | 9.291 | 92.116 | 8.346 |
| 1492 | | | | | | | | |
| MAPT- | 120 | 504 | 15.4475 | 3.58432427 | 12.913 | 5.176 | 17.982 | 3.997 |
| 1494 | | | | | | | | |
| MAPT- | 121 | 505 | 18.204 | 1.04793225 | 18.945 | 3.15 | 17.463 | 3.766 |
| 1495 | | | | | | | | |
| MAPT- | 122 | 506 | 20.014 | 2.4607316 | 18.274 | 6.805 | 21.754 | 5.32 |
| 1498 | | | | | | | | |
| MAPT- | 123 | 507 | 65.7465 | 24.832883 | 48.187 | 11.539 | 83.306 | 19.091 |
| 1499 | | | | | | | | |
| MAPT- | 124 | 508 | 18.62 | 5.80393246 | 14.516 | 4.376 | 22.724 | 5.504 |
| 1500 | | | | | | | | |
| MAPT- | 125 | 509 | 34.775 | 5.02187236 | 38.326 | 10.536 | 31.224 | 4.366 |
| 1502 | | | | | | | | |
| MAPT- | 126 | 510 | 31.277 | 11.1058191 | 39.13 | 11.069 | 23.424 | 3.92 |
| 1503 | | | | | | | | |
| MAPT- | 127 | 511 | 24.627 | 3.87211673 | 27.365 | 4.52 | 21.889 | 2.089 |
| 1504 | | | | | | | | |
| MAPT- | 128 | 512 | 10.3425 | 2.81074946 | 12.33 | 1.998 | 8.355 | 2.686 |
| 1505 | | | | | | | | |
| MAPT- | 129 | 513 | 57.631 | 0.21354625 | 57.48 | 23.99 | 57.782 | 17.417 |
| 1506 | | | | | | | | |
| MAPT- | 130 | 514 | 32.112 | 3.45068109 | 34.552 | 9.62 | 29.672 | 4.255 |
| 1507 | | | | | | | | |
| MAPT- | 131 | 515 | 27.841 | 5.67099639 | 31.851 | 8.28 | 23.831 | 6.196 |
| 1508 | | | | | | | | |
| MAPT- | 132 | 516 | 38.7 | 4.51699812 | 41.894 | 7.785 | 35.506 | 5.674 |
| 1509 | | | | | | | | |
| MAPT- | 133 | 517 | 15.758 | 4.39961839 | 18.869 | 4.717 | 12.647 | 3.372 |
| 1733 | | | | | | | | |
| MAPT- | 134 | 518 | 78.742 | 9.03116781 | 85.128 | 12.726 | 72.356 | 9.03 |
| 1796 | | | | | | | | |
| MAPT- | 135 | 519 | 77.3505 | 24.4199327 | 94.618 | 20.422 | 60.083 | 13.368 |
| 1835 | | | | | | | | |
| MAPT- | 136 | 520 | 24.699 | 5.16329372 | 28.35 | 13.873 | 21.048 | 4.701 |
| 1912 | | | | | | | | |
| MAPT- | 137 | 521 | 18.8405 | 9.74463855 | 25.731 | 6.678 | 11.95 | 1.689 |
| 2094 | | | | | | | | |
| MAPT- | 138 | 522 | 13.6925 | 1.29471252 | 14.608 | 3.403 | 12.777 | 2.067 |
| 2096 | | | | | | | | |
| MAPT- | 139 | 523 | 21.9025 | 4.07081374 | 19.024 | 4.924 | 24.781 | 3.696 |
| 2097 | | | | | | | | |
| MAPT- | 140 | 524 | 17.656 | 9.87828173 | 10.671 | 3.205 | 24.641 | 2.915 |
| 2098 | | | | | | | | |
| MAPT- | 141 | 525 | 22.912 | 10.0098036 | 29.99 | 6.919 | 15.834 | 5.794 |
| 2105 | | | | | | | | |
| MAPT- | 142 | 526 | 16.6545 | 1.53937146 | 17.743 | 3.658 | 15.566 | 3.854 |
| 2106 | | | | | | | | |
| MAPT- | 143 | 527 | 33.657 | 2.05343809 | 35.109 | 4.469 | 32.205 | 5.491 |
| 2107 | | | | | | | | |
| MAPT- | 144 | 528 | 27.0645 | 15.2940126 | 37.879 | 8.018 | 16.25 | 2.844 |
| 2108 | | | | | | | | |
| MAPT- | 145 | 529 | 18.066 | 0.36769553 | 18.326 | 6.375 | 17.806 | 4.395 |
| 2109 | | | | | | | | |
| MAPT- | 146 | 530 | 70.417 | 5.66958217 | 66.408 | 16.607 | 74.426 | 11.191 |
| 2117 | | | | | | | | |
| MAPT- | 147 | 531 | 30.333 | 0.4794184 | 30.672 | 6.394 | 29.994 | 3.926 |
| 2136 | | | | | | | | |
| MAPT- | 148 | 532 | 30.2155 | 0.61023315 | 29.784 | 5.066 | 30.647 | 4.74 |
| 2137 | | | | | | | | |
| MAPT- | 149 | 533 | 22.638 | 2.83974083 | 20.63 | 4.29 | 24.646 | 6.881 |
| 2269 | | | | | | | | |
| MAPT- | 150 | 534 | 12.216 | 1.87241876 | 10.892 | 3.111 | 13.54 | 3.021 |
| 2270 | | | | | | | | |
| MAPT- | 151 | 535 | 31.5845 | 14.4270997 | 21.383 | 9.46 | 41.786 | 5.402 |
| 2271 | | | | | | | | |
| MAPT- | 152 | 536 | 27.5985 | 12.4514433 | 36.403 | 7.932 | 18.794 | 4.51 |
| 2272 | | | | | | | | |
| MAPT- | 153 | 537 | 14.2115 | 3.25764094 | 11.908 | 3.525 | 16.515 | 2.483 |
| 2273 | | | | | | | | |
| MAPT- | 154 | 538 | 13.829 | 4.75317178 | 10.468 | 4.009 | 17.19 | 2.488 |
| 2274 | | | | | | | | |
| MAPT- | 155 | 539 | 19.6215 | 0.85772053 | 19.015 | 6.27 | 20.228 | 3.6 |
| 2275 | | | | | | | | |
| MAPT- | 156 | 540 | 13.741 | 6.74155605 | 8.974 | 4.323 | 18.508 | 4.472 |
| 2276 | | | | | | | | |
| MAPT- | 157 | 541 | 35.06 | 2.40133463 | 33.362 | 8.636 | 36.758 | 4.222 |
| 2277 | | | | | | | | |
| MAPT- | 158 | 542 | 62.9755 | 7.38007348 | 57.757 | 15.426 | 68.194 | 14.479 |
| 2278 | | | | | | | | |
| MAPT- | 159 | 543 | 12.3635 | 0.0629325 | 12.408 | 6.106 | 12.319 | 4.131 |
| 2279 | | | | | | | | |
| MAPT- | 160 | 544 | 22.4485 | 4.5672027 | 19.219 | 6.284 | 25.678 | 6.587 |
| 2280 | | | | | | | | |
| MAPT- | 161 | 545 | 11.262 | 3.82544769 | 13.967 | 4.235 | 8.557 | 4.509 |
| 2281 | | | | | | | | |
| MAPT- | 162 | 546 | 22.766 | 10.3704281 | 30.099 | 11.793 | 15.433 | 2.563 |
| 2282 | | | | | | | | |
| MAPT- | 163 | 547 | 22.093 | 2.21748687 | 23.661 | 9.459 | 20.525 | 5.485 |
| 2283 | | | | | | | | |
| MAPT- | 164 | 548 | 9.3375 | 0.48578236 | 9.681 | 3.741 | 8.994 | 2.065 |
| 2284 | | | | | | | | |
| MAPT- | 165 | 549 | 43.909 | 5.46452121 | 40.045 | 5.708 | 47.773 | 11.236 |
| 2286 | | | | | | | | |
| MAPT- | 166 | 550 | 44.999 | 0.15839192 | 45.111 | 3.984 | 44.887 | 11.572 |
| 2288 | | | | | | | | |
| MAPT- | 167 | 551 | 16.7085 | 2.74710984 | 18.651 | 6.81 | 14.766 | 5.374 |
| 2289 | | | | | | | | |
| MAPT- | 168 | 552 | 20.7095 | 1.76423142 | 19.462 | 4.227 | 21.957 | 4.191 |
| 2291 | | | | | | | | |
| MAPT- | 169 | 553 | 36.6055 | 15.5033162 | 47.568 | 9.742 | 25.643 | 7.144 |
| 2294 | | | | | | | | |
| MAPT- | 170 | 554 | 12.62 | 3.60624458 | 15.17 | 3.604 | 10.07 | 3.636 |
| 2299 | | | | | | | | |
| MAPT- | 171 | 555 | 17.296 | 0.32385491 | 17.525 | 5.091 | 17.067 | 4.382 |
| 2300 | | | | | | | | |
| MAPT- | 172 | 556 | 14.4115 | 2.7838794 | 12.443 | 3.439 | 16.38 | 5.47 |
| 2301 | | | | | | | | |
| MAPT- | 173 | 557 | 39.5035 | 12.6225632 | 48.429 | 8.232 | 30.578 | 4.345 |
| 2308 | | | | | | | | |
| MAPT- | 174 | 558 | 36.121 | 1.50755166 | 35.055 | 9.878 | 37.187 | 6.948 |
| 2316 | | | | | | | | |
| MAPT- | 175 | 559 | 23.2925 | 4.71145248 | 19.961 | 7.977 | 26.624 | 5.453 |
| 2317 | | | | | | | | |
| MAPT- | 176 | 560 | 46.479 | 18.4795286 | 33.412 | 7.15 | 59.546 | 16.236 |
| 2319 | | | | | | | | |
| MAPT- | 177 | 561 | 34.5325 | 16.1340554 | 45.941 | 18.317 | 23.124 | 5.385 |
| 2320 | | | | | | | | |
| MAPT- | 178 | 562 | 49.3475 | 9.8747462 | 56.33 | 10.684 | 42.365 | 6.267 |
| 2322 | | | | | | | | |
| MAPT- | 179 | 563 | 37.4055 | 9.99071171 | 44.47 | 7.337 | 30.341 | 7.651 |
| 2323 | | | | | | | | |
| MAPT- | 180 | 564 | 29.453 | 6.20981175 | 25.062 | 3.998 | 33.844 | 9.822 |
| 2324 | | | | | | | | |
| MAPT- | 181 | 565 | 40.7595 | 0.49709607 | 41.111 | 8.995 | 40.408 | 14.253 |
| 2326 | | | | | | | | |
| MAPT- | 182 | 566 | 53.6645 | 1.63129534 | 54.818 | 11.735 | 52.511 | 11.097 |
| 2330 | | | | | | | | |
| MAPT- | 183 | 567 | 41.555 | 10.4071976 | 34.196 | 6.582 | 48.914 | 10.912 |
| 2356 | | | | | | | | |
| MAPT- | 184 | 568 | 16.16 | 7.5702852 | 21.513 | 1.827 | 10.807 | 3.58 |
| 2357 | | | | | | | | |
| MAPT- | 185 | 569 | 15.9115 | 0.34718943 | 16.157 | 5.317 | 15.666 | 2.953 |
| 2358 | | | | | | | | |
| MAPT- | 186 | 570 | 38.779 | 13.5198817 | 48.339 | 12.534 | 29.219 | 3.728 |
| 2359 | | | | | | | | |
| MAPT- | 187 | 571 | 56.6595 | 2.41759808 | 58.369 | 9.583 | 54.95 | 7.626 |
| 2360 | | | | | | | | |
| MAPT- | 188 | 572 | 19.9675 | 15.8893965 | 31.203 | 7.037 | 8.732 | 1.814 |
| 2361 | | | | | | | | |
| MAPT- | 189 | 573 | 25.7945 | 4.27021785 | 28.814 | 11.436 | 22.775 | 6.312 |
| 2362 | | | | | | | | |
| MAPT- | 190 | 574 | 29.327 | 6.8094383 | 34.142 | 13.111 | 24.512 | 10.071 |
| 2363 | | | | | | | | |
| MAPT- | 191 | 575 | 13.174 | 2.66154992 | 11.292 | 3.193 | 15.056 | 3.026 |
| 2364 | | | | | | | | |
| MAPT- | 192 | 576 | 22.5375 | 0.18314066 | 22.408 | 4.494 | 22.667 | 3.198 |
| 2365 | | | | | | | | |
| MAPT- | 193 | 577 | 10.775 | 5.70918015 | 14.812 | 6.29 | 6.738 | 2.466 |
| 2372 | | | | | | | | |
| MAPT- | 194 | 578 | 14.297 | 0.80468752 | 13.728 | 3.586 | 14.866 | 3.452 |
| 2373 | | | | | | | | |
| MAPT- | 195 | 579 | 11.664 | 0.88529769 | 11.038 | 4.433 | 12.29 | 2.181 |
| 2374 | | | | | | | | |
| MAPT- | 196 | 580 | 19.954 | 1.3449171 | 20.905 | 3.625 | 19.003 | 5.119 |
| 2375 | | | | | | | | |
| MAPT- | 197 | 581 | 11.6305 | 7.16228459 | 6.566 | 2.913 | 16.695 | 5.49 |
| 2376 | | | | | | | | |
| MAPT- | 198 | 582 | 17.774 | 4.86630887 | 14.333 | 4.695 | 21.215 | 5.419 |
| 2377 | | | | | | | | |
| MAPT- | 199 | 583 | 15.912 | 6.94096016 | 11.004 | 7.297 | 20.82 | 6.571 |
| 2378 | | | | | | | | |
| MAPT- | 200 | 584 | 10.8575 | 3.47825826 | 8.398 | 3.267 | 13.317 | 2.091 |
| 2379 | | | | | | | | |
| MAPT- | 201 | 585 | 54.1995 | 16.1213275 | 42.8 | 16.849 | 65.599 | 12.511 |
| 2380 | | | | | | | | |
| MAPT- | 202 | 586 | 23.8745 | 5.39027499 | 20.063 | 5.735 | 27.686 | 4.702 |
| 2381 | | | | | | | | |
| MAPT- | 203 | 587 | 6.365 | 0.30547013 | 6.581 | 2.357 | 6.149 | 2.123 |
| 2382 | | | | | | | | |
| MAPT- | 204 | 588 | 6.377 | 0.34931075 | 6.13 | 2.062 | 6.624 | 1.482 |
| 2390 | | | | | | | | |
| MAPT- | 205 | 589 | 12.498 | 2.13121984 | 10.991 | 5.358 | 14.005 | 4.476 |
| 2391 | | | | | | | | |
| MAPT- | 206 | 590 | 66.506 | 38.9842111 | 38.94 | 9.142 | 94.072 | 16.71 |
| 2414 | | | | | | | | |
| MAPT- | 207 | 591 | 101.6285 | 16.4791235 | 89.976 | 32.779 | 113.281 | 40.057 |
| 2448 | | | | | | | | |
| MAPT- | 208 | 592 | 6.118 | 1.94171522 | 7.491 | 2.885 | 4.745 | 2.142 |
| 2449 | | | | | | | | |
| MAPT- | 209 | 593 | 5.428 | 0.44264885 | 5.741 | 1.379 | 5.115 | 0.708 |
| 2450 | | | | | | | | |
| MAPT- | 210 | 594 | 9.3195 | 2.04141728 | 7.876 | 3.092 | 10.763 | 3.026 |
| 2451 | | | | | | | | |
| MAPT- | 211 | 595 | 12.4495 | 0.23688077 | 12.282 | 3.89 | 12.617 | 3.728 |
| 2452 | | | | | | | | |
| MAPT- | 212 | 596 | 6.363 | 2.26981277 | 4.758 | 1.495 | 7.968 | 1.487 |
| 2453 | | | | | | | | |
| MAPT- | 213 | 597 | 7.1635 | 0.37264527 | 7.427 | 3.314 | 6.9 | 1.49 |
| 2454 | | | | | | | | |
| MAPT- | 214 | 598 | 5.641 | 0.69437886 | 6.132 | 1.582 | 5.15 | 2.739 |
| 2456 | | | | | | | | |
| MAPT- | 215 | 599 | 16.472 | 7.58584155 | 11.108 | 2.63 | 21.836 | 5.922 |
| 2457 | | | | | | | | |
| MAPT- | 216 | 600 | 12.6805 | 3.12329065 | 14.889 | 6.56 | 10.472 | 3.719 |
| 2567 | | | | | | | | |
| MAPT- | 217 | 601 | 64.8695 | 33.2927086 | 41.328 | 16.719 | 88.411 | 33.918 |
| 2598 | | | | | | | | |
| MAPT- | 218 | 602 | 68.409 | 37.9249651 | 41.592 | 8.109 | 95.226 | 13.823 |
| 2657 | | | | | | | | |
| MAPT- | 219 | 603 | 11.61 | 0.04384062 | 11.579 | 8.192 | 11.641 | 11.451 |
| 2723 | | | | | | | | |
| MAPT- | 220 | 604 | 233.808 | | 233.808 | 161.639 | | |
| 2724 | | | | | | | | |
| MAPT- | 221 | 605 | 1302.476 | | 1302.476 | 848.106 | | |
| 2726 | | | | | | | | |
| MAPT- | 222 | 606 | 10.97 | 5.81100353 | 6.861 | 1.876 | 15.079 | 4.091 |
| 2784 | | | | | | | | |
| MAPT- | 223 | 607 | 40.636 | 1.52876486 | 39.555 | 13.364 | 41.717 | 9.834 |
| 2963 | | | | | | | | |
| MAPT- | 224 | 608 | 67.4985 | 25.5979726 | 49.398 | 18.559 | 85.599 | 30.988 |
| 3110 | | | | | | | | |
| MAPT- | 225 | 609 | 34.0185 | 10.2622407 | 26.762 | 7.333 | 41.275 | 9.007 |
| 3114 | | | | | | | | |
| MAPT- | 226 | 610 | 23.677 | 5.0883404 | 20.079 | 5.942 | 27.275 | 7.786 |
| 3116 | | | | | | | | |
| MAPT- | 227 | 611 | 17.6195 | 5.74948524 | 21.685 | 7.03 | 13.554 | 4.395 |
| 3118 | | | | | | | | |
| MAPT- | 228 | 612 | 33.388 | 17.8502036 | 20.766 | 7.711 | 46.01 | 13.684 |
| 3158 | | | | | | | | |
| MAPT- | 229 | 613 | 108.324 | 38.5344911 | 135.572 | 60.571 | 81.076 | 13.918 |
| 3503 | | | | | | | | |
| MAPT- | 230 | 614 | 39.759 | 3.12258355 | 41.967 | 10.832 | 37.551 | 6.071 |
| 3589 | | | | | | | | |
| MAPT- | 231 | 615 | 204.4415 | 111.869243 | 125.338 | 69.843 | 283.545 | 162.626 |
| 3591 | | | | | | | | |
| MAPT- | 232 | 616 | 136.1045 | 32.3423571 | 113.235 | 30.524 | 158.974 | 46.677 |
| 3592 | | | | | | | | |
| MAPT- | 233 | 617 | 63.914 | 14.1619346 | 53.9 | 10.02 | 73.928 | 12.246 |
| 3593 | | | | | | | | |
| MAPT- | 234 | 618 | 80.7265 | 46.8465314 | 47.601 | 28.291 | 113.852 | 56.081 |
| 3594 | | | | | | | | |
| MAPT- | 235 | 619 | 33.518 | 3.51997756 | 31.029 | 3.774 | 36.007 | 4.987 |
| 3595 | | | | | | | | |
| MAPT- | 236 | 620 | 50.5415 | 9.44623949 | 57.221 | 22.189 | 43.862 | 7.353 |
| 3596 | | | | | | | | |
| MAPT- | 237 | 621 | 207.694 | 70.014885 | 158.186 | 64.728 | 257.202 | 178.898 |
| 3597 | | | | | | | | |
| MAPT- | 238 | 622 | 52.1005 | 3.0865211 | 49.918 | 5.249 | 54.283 | 7.413 |
| 3598 | | | | | | | | |
| MAPT- | 239 | 623 | 364.1355 | 362.407075 | 620.396 | 189.266 | 107.875 | 48.489 |
| 3599 | | | | | | | | |
| MAPT- | 240 | 624 | 100.4525 | 30.5364063 | 122.045 | 56.065 | 78.86 | 42.186 |
| 3600 | | | | | | | | |
| MAPT- | 241 | 625 | 47.233 | 12.1297097 | 38.656 | 5.821 | 55.81 | 7.764 |
| 3601 | | | | | | | | |
| MAPT- | 242 | 626 | 43.078 | 9.10894956 | 36.637 | 5.569 | 49.519 | 8.21 |
| 3602 | | | | | | | | |
| MAPT- | 243 | 627 | 46.1485 | 9.83797665 | 39.192 | 6.61 | 53.105 | 14.334 |
| 3603 | | | | | | | | |
| MAPT- | 244 | 628 | 38.537 | 6.97490129 | 43.469 | 6.803 | 33.605 | 12.721 |
| 3605 | | | | | | | | |
| MAPT- | 245 | 629 | 52.929 | 12.1099107 | 44.366 | 6.167 | 61.492 | 10.195 |
| 3607 | | | | | | | | |
| MAPT- | 246 | 630 | 61.4085 | 31.4839294 | 39.146 | 5.412 | 83.671 | 11.371 |
| 3609 | | | | | | | | |
| MAPT- | 247 | 631 | 53.294 | 26.6211561 | 34.47 | 5.122 | 72.118 | 6.918 |
| 3610 | | | | | | | | |
| MAPT- | 248 | 632 | 72.7675 | 16.9755125 | 60.764 | 8.013 | 84.771 | 12.398 |
| 3677 | | | | | | | | |
| MAPT- | 249 | 633 | 44.9005 | 19.9778879 | 30.774 | 5.138 | 59.027 | 10.698 |
| 3678 | | | | | | | | |
| MAPT- | 250 | 634 | 72.05 | 31.5638325 | 49.731 | 5.218 | 94.369 | 10.439 |
| 3679 | | | | | | | | |
| MAPT- | 251 | 635 | 58.9445 | 1.90565278 | 60.292 | 9.168 | 57.597 | 15.808 |
| 3680 | | | | | | | | |
| MAPT- | 252 | 636 | 60.937 | 9.03682466 | 54.547 | 8.505 | 67.327 | 20.084 |
| 3958 | | | | | | | | |
| MAPT- | 253 | 637 | 76.6655 | 34.4580206 | 52.3 | 5.769 | 101.031 | 26.056 |
| 3959 | | | | | | | | |
| MAPT- | 254 | 638 | 75.305 | 39.354735 | 47.477 | 5.803 | 103.133 | 19.335 |
| 3960 | | | | | | | | |
| MAPT- | 255 | 639 | 45.3385 | 7.61483293 | 39.954 | 10.197 | 50.723 | 5.643 |
| 3961 | | | | | | | | |
| MAPT- | 256 | 640 | 72.0995 | 2.20688026 | 70.539 | 7.456 | 73.66 | 8.937 |
| 3965 | | | | | | | | |
| MAPT- | 257 | 641 | 74.1615 | 12.9549033 | 65.001 | 14.647 | 83.322 | 16.913 |
| 3970 | | | | | | | | |
| MAPT- | 258 | 642 | 77.359 | 47.5543452 | 43.733 | 6.924 | 110.985 | 17.09 |
| 4146 | | | | | | | | |
| MAPT- | 259 | 643 | 42.89 | 0.51194531 | 43.252 | 6.788 | 42.528 | 13.112 |
| 4474 | | | | | | | | |
| MAPT- | 260 | 644 | 66.3895 | 44.1764962 | 35.152 | 5.684 | 97.627 | 19.713 |
| 4475 | | | | | | | | |
| MAPT- | 261 | 645 | 68.927 | 35.8870834 | 43.551 | 6.949 | 94.303 | 12.932 |
| 4477 | | | | | | | | |
| MAPT- | 262 | 646 | 50.6895 | 22.0624387 | 35.089 | 7.887 | 66.29 | 21.359 |
| 4478 | | | | | | | | |
| MAPT- | 263 | 647 | 40.2915 | 16.0223326 | 51.621 | 8.132 | 28.962 | 6.75 |
| 4479 | | | | | | | | |
| MAPT- | 264 | 648 | 62.963 | 18.7227734 | 76.202 | 15.622 | 49.724 | 17.779 |
| 4480 | | | | | | | | |
| MAPT- | 265 | 649 | 62.488 | 35.7329341 | 37.221 | 8.557 | 87.755 | 19.687 |
| 4481 | | | | | | | | |
| MAPT- | 266 | 650 | 96.4665 | 98.6859437 | 26.685 | 10.537 | 166.248 | 71.368 |
| 4482 | | | | | | | | |
| MAPT- | 267 | 651 | 67.466 | 56.8216867 | 27.287 | 9.898 | 107.645 | 19.981 |
| 4485 | | | | | | | | |
| MAPT- | 268 | 652 | 64.4675 | 54.6770319 | 25.805 | 8.223 | 103.13 | 13.135 |
| 4486 | | | | | | | | |
| MAPT- | 269 | 653 | 50.712 | 44.6028815 | 19.173 | 5.038 | 82.251 | 13.252 |
| 4532 | | | | | | | | |
| MAPT- | 270 | 654 | 56.2795 | 28.997742 | 35.775 | 6.797 | 76.784 | 17.19 |
| 4533 | | | | | | | | |
| MAPT- | 271 | 655 | 84.0985 | 66.4744014 | 37.094 | 8.676 | 131.103 | 23.594 |
| 4539 | | | | | | | | |
| MAPT- | 272 | 656 | 56.93 | 25.0980481 | 39.183 | 14.927 | 74.677 | 14.251 |
| 4540 | | | | | | | | |
| MAPT- | 273 | 657 | 42.061 | 23.7969716 | 25.234 | 4.689 | 58.888 | 6.414 |
| 4541 | | | | | | | | |
| MAPT- | 274 | 658 | 37.3465 | 16.4183124 | 25.737 | 2.55 | 48.956 | 6.301 |
| 4543 | | | | | | | | |
| MAPT- | 275 | 659 | 49.8975 | 30.8022785 | 28.117 | 6.319 | 71.678 | 14.003 |
| 4544 | | | | | | | | |
| MAPT- | 276 | 660 | 52.179 | 17.3524004 | 39.909 | 9.44 | 64.449 | 17.044 |
| 4545 | | | | | | | | |
| MAPT- | 277 | 661 | 34.6085 | 5.14420183 | 30.971 | 6.568 | 38.246 | 10.405 |
| 4546 | | | | | | | | |
| MAPT- | 278 | 662 | 38.51 | 12.7293363 | 29.509 | 9.311 | 47.511 | 5.308 |
| 4547 | | | | | | | | |
| MAPT- | 279 | 663 | 46.233 | 8.19678181 | 52.029 | 9.095 | 40.437 | 10.11 |
| 4548 | | | | | | | | |
| MAPT- | 280 | 664 | 46.195 | 5.19440641 | 49.868 | 9.773 | 42.522 | 9.731 |
| 4549 | | | | | | | | |
| MAPT- | 281 | 665 | 64.53 | 30.5625693 | 42.919 | 7.626 | 86.141 | 16.456 |
| 4550 | | | | | | | | |
| MAPT- | 282 | 666 | 48.566 | 4.18890057 | 45.604 | 10.327 | 51.528 | 13.065 |
| 4551 | | | | | | | | |
| MAPT- | 283 | 667 | 38.5625 | 36.1041651 | 13.033 | 5.295 | 64.092 | 10.666 |
| 4552 | | | | | | | | |
| MAPT- | 284 | 668 | 58.8795 | 40.1375022 | 30.498 | 5.099 | 87.261 | 14.948 |
| 4554 | | | | | | | | |
| MAPT- | 285 | 669 | 60.179 | 22.017891 | 44.61 | 13.332 | 75.748 | 6.493 |
| 4556 | | | | | | | | |
| MAPT- | 286 | 670 | 44.634 | 7.32704047 | 39.453 | 7.608 | 49.815 | 7.645 |
| 4557 | | | | | | | | |
| MAPT- | 287 | 671 | 44.4695 | 15.0436968 | 55.107 | 13.83 | 33.832 | 4.355 |
| 4558 | | | | | | | | |
| MAPT- | 288 | 672 | 62.3795 | 19.7912117 | 76.374 | 17.486 | 48.385 | 7.434 |
| 4559 | | | | | | | | |
| MAPT- | 289 | 673 | 48.0585 | 20.8518719 | 33.314 | 11.514 | 62.803 | 7.869 |
| 4560 | | | | | | | | |
| MAPT- | 290 | 674 | 45.0945 | 0.04030509 | 45.123 | 15.353 | 45.066 | 13.72 |
| 4561 | | | | | | | | |
| MAPT- | 291 | 675 | 31.412 | 1.63341666 | 32.567 | 5.823 | 30.257 | 5.108 |
| 4562 | | | | | | | | |
| MAPT- | 292 | 676 | 40.812 | 16.5957962 | 29.077 | 4.004 | 52.547 | 13.653 |
| 4563 | | | | | | | | |
| MAPT- | 293 | 677 | 51.221 | 23.9878904 | 34.259 | 9.457 | 68.183 | 17.349 |
| 4564 | | | | | | | | |
| MAPT- | 294 | 678 | 50.634 | 4.53396868 | 47.428 | 11.37 | 53.84 | 9.461 |
| 4615 | | | | | | | | |
| MAPT- | 295 | 679 | 50.985 | 5.68372431 | 55.004 | 11.45 | 46.966 | 8.038 |
| 4616 | | | | | | | | |
| MAPT- | 296 | 680 | 55.1025 | 21.5702924 | 70.355 | 20.557 | 39.85 | 5.507 |
| 4617 | | | | | | | | |
| MAPT- | 297 | 681 | 48.908 | 3.70665375 | 46.287 | 11.781 | 51.529 | 19.126 |
| 4618 | | | | | | | | |
| MAPT- | 298 | 682 | 38.3115 | 20.5859997 | 23.755 | 5.348 | 52.868 | 12.438 |
| 4619 | | | | | | | | |
| MAPT- | 299 | 683 | 34.8815 | 12.0597062 | 26.354 | 7.457 | 43.409 | 13.598 |
| 4620 | | | | | | | | |
| MAPT- | 300 | 684 | 50.155 | 18.3437641 | 37.184 | 8.204 | 63.126 | 8.376 |
| 4621 | | | | | | | | |
| MAPT- | 301 | 685 | 32.6225 | 1.30178358 | 33.543 | 5.593 | 31.702 | 6.676 |
| 4622 | | | | | | | | |
| MAPT- | 302 | 686 | 45.0005 | 13.5983705 | 35.385 | 8.943 | 54.616 | 7.648 |
| 4623 | | | | | | | | |
| MAPT- | 303 | 687 | 48.5845 | 6.76347636 | 43.802 | 5.103 | 53.367 | 7.374 |
| 4625 | | | | | | | | |
| MAPT- | 304 | 688 | 54.916 | 15.3710872 | 65.785 | 13.194 | 44.047 | 13.218 |
| 4627 | | | | | | | | |
| MAPT- | 305 | 689 | 35.7 | 2.4508321 | 33.967 | 6.77 | 37.433 | 7.946 |
| 4628 | | | | | | | | |
| MAPT- | 306 | 690 | 31.7615 | 4.28718841 | 28.73 | 7.064 | 34.793 | 10.844 |
| 4629 | | | | | | | | |
| MAPT- | 307 | 691 | 26.347 | 10.6235723 | 18.835 | 4.239 | 33.859 | 12.366 |
| 4630 | | | | | | | | |
| MAPT- | 308 | 692 | 39.4495 | 7.60917607 | 34.069 | 5.742 | 44.83 | 10.263 |
| 4632 | | | | | | | | |
| MAPT- | 309 | 693 | 61.3835 | 14.1074874 | 51.408 | 15.912 | 71.359 | 22.804 |
| 4633 | | | | | | | | |
| MAPT- | 310 | 694 | 52.238 | 12.4252804 | 43.452 | 10.809 | 61.024 | 10.061 |
| 4825 | | | | | | | | |
| MAPT- | 311 | 695 | 48.2045 | 2.66508546 | 46.32 | 8.016 | 50.089 | 16.64 |
| 4828 | | | | | | | | |
| MAPT- | 312 | 696 | 89.127 | 35.3779665 | 114.143 | 29.128 | 64.111 | 16.557 |
| 5682 | | | | | | | | |
| MAPT- | 313 | 697 | 46.249 | 12.6359982 | 37.314 | 6.879 | 55.184 | 14.344 |
| 5958 | | | | | | | | |
| MAPT- | 314 | 698 | 43.587 | 19.7523208 | 29.62 | 8.048 | 57.554 | 13.293 |
| 5959 | | | | | | | | |
| MAPT- | 315 | 699 | 40.428 | 6.24658131 | 36.011 | 10.381 | 44.845 | 4.108 |
| 5961 | | | | | | | | |
| MAPT- | 316 | 700 | 38.295 | 2.01808275 | 36.868 | 5.593 | 39.722 | 10.772 |
| 5963 | | | | | | | | |
| MAPT- | 317 | 701 | 52.7395 | 16.4678098 | 41.095 | 8.774 | 64.384 | 7.757 |
| 5964 | | | | | | | | |
| MAPT- | 318 | 702 | 45.2395 | 21.7541401 | 29.857 | 7.021 | 60.622 | 8.921 |
| 5965 | | | | | | | | |
| MAPT- | 319 | 703 | 51.0255 | 9.61877354 | 44.224 | 6.395 | 57.827 | 9.074 |
| 5966 | | | | | | | | |
| MAPT- | 320 | 704 | 56.756 | 19.2488608 | 43.145 | 10.168 | 70.367 | 13.456 |
| 5967 | | | | | | | | |
| MAPT- | 321 | 705 | 49.755 | 14.8365145 | 60.246 | 12.788 | 39.264 | 9.459 |
| 5968 | | | | | | | | |
| MAPT- | 322 | 706 | 30.953 | 2.88358145 | 32.992 | 7.492 | 28.914 | 6.891 |
| 6006 | | | | | | | | |
| MAPT- | 323 | 707 | 46.1245 | 14.5968053 | 35.803 | 7.552 | 56.446 | 6.025 |
| 6007 | | | | | | | | |
| MAPT- | 324 | 708 | 52.218 | 3.03065966 | 54.361 | 9.738 | 50.075 | 7.532 |
| 6008 | | | | | | | | |
| MAPT- | 325 | 709 | 76.4995 | 42.195183 | 106.336 | 19.189 | 46.663 | 11.419 |
| 6009 | | | | | | | | |
| MAPT- | 326 | 710 | 58.729 | 23.2892689 | 42.261 | 7.547 | 75.197 | 5.272 |
| 6010 | | | | | | | | |
| MAPT- | 327 | 711 | 52.692 | 4.01212388 | 49.855 | 12.113 | 55.529 | 14.5 |
| 6011 | | | | | | | | |
| MAPT- | 328 | 712 | 63.9645 | 0.68377226 | 64.448 | 15.339 | 63.481 | 10.773 |
| 6012 | | | | | | | | |
| MAPT- | 329 | 713 | 53.8995 | 17.2314852 | 66.084 | 23.254 | 41.715 | 10.372 |
| 6013 | | | | | | | | |
| MAPT- | 330 | 714 | 33.9865 | 1.58886894 | 32.863 | 4.884 | 35.11 | 8.916 |
| 6014 | | | | | | | | |
| MAPT- | 331 | 715 | 47.801 | 25.4077609 | 29.835 | 8.764 | 65.767 | 6.147 |
| 6015 | | | | | | | | |
| MAPT- | 332 | 716 | 46.9375 | 0.02192031 | 46.953 | 10.206 | 46.922 | 11.089 |
| 6017 | | | | | | | | |
| MAPT- | 333 | 717 | 54.6625 | 9.43492578 | 61.334 | 13.818 | 47.991 | 12.587 |
| 6119 | | | | | | | | |
| MAPT- | 334 | 718 | 64.7155 | 0.73468395 | 65.235 | 6.382 | 64.196 | 10.199 |
| 6628 | | | | | | | | |
| MAPT- | 335 | 719 | 50.0975 | 11.687768 | 58.362 | 10.929 | 41.833 | 14.095 |
| 6629 | | | | | | | | |
| MAPT- | 336 | 720 | 81.9435 | 12.0568777 | 73.418 | 19.87 | 90.469 | 17.638 |
| 6631 | | | | | | | | |
| MAPT- | 337 | 721 | 33.822 | 12.4677068 | 25.006 | 8.472 | 42.638 | 12.985 |
| 6672 | | | | | | | | |
| MAPT- | 338 | 722 | 24.959 | 10.8512607 | 17.286 | 2.982 | 32.632 | 9.031 |
| 6731 | | | | | | | | |
| MAPT- | 339 | 723 | 38.0145 | 13.7228213 | 28.311 | 11.443 | 47.718 | 15.906 |
| 6732 | | | | | | | | |
| MAPT- | 340 | 724 | 34.031 | 28.3691241 | 13.971 | 3.303 | 54.091 | 13.69 |
| 6738 | | | | | | | | |
| MAPT- | 341 | 725 | 38.316 | 29.593833 | 17.39 | 2.841 | 59.242 | 14.056 |
| 6739 | | | | | | | | |
| MAPT- | 342 | 726 | 34.866 | 13.8847488 | 25.048 | 11.345 | 44.684 | 6.187 |
| 6740 | | | | | | | | |
| MAPT- | 343 | 727 | 34.507 | 11.2825958 | 26.529 | 7.507 | 42.485 | 10.487 |
| 6741 | | | | | | | | |
| MAPT- | 344 | 728 | 62.1435 | 29.7882874 | 41.08 | 12.738 | 83.207 | 17.359 |
| 6742 | | | | | | | | |
| MAPT- | 345 | 729 | 29.6205 | 23.3790715 | 13.089 | 2.767 | 46.152 | 5.76 |
| 6743 | | | | | | | | |
| MAPT- | 346 | 730 | 26.926 | 10.1229407 | 19.768 | 4.146 | 34.084 | 5.015 |
| 6745 | | | | | | | | |
| MAPT- | 347 | 731 | 60.0265 | 3.40471915 | 57.619 | 11.694 | 62.434 | 11.211 |
| 6748 | | | | | | | | |
| MAPT- | 348 | 732 | 50.6395 | 36.3502383 | 24.936 | 4.104 | 76.343 | 16.107 |
| 6749 | | | | | | | | |
| MAPT- | 349 | 733 | 44.856 | 3.86080303 | 47.586 | 12.024 | 42.126 | 13.817 |
| 6750 | | | | | | | | |
| MAPT- | 350 | 734 | 78.4055 | 17.0730932 | 66.333 | 7.978 | 90.478 | 12.547 |
| 6751 | | | | | | | | |
| MAPT- | 351 | 735 | 50.173 | 15.0231907 | 60.796 | 7.566 | 39.55 | 9.59 |
| 6752 | | | | | | | | |
| MAPT- | 352 | 736 | 71.371 | 11.5413969 | 63.21 | 16.035 | 79.532 | 21.212 |
| 6753 | | | | | | | | |
| MAPT- | 353 | 737 | 36.8455 | 3.50654253 | 34.366 | 6.737 | 39.325 | 9.505 |
| 6754 | | | | | | | | |
| MAPT- | 354 | 738 | 49.7045 | 24.223357 | 66.833 | 10.306 | 32.576 | 5.734 |
| 6755 | | | | | | | | |
| MAPT- | 355 | 739 | 44.4755 | 32.1599235 | 21.735 | 7.721 | 67.216 | 9.314 |
| 6756 | | | | | | | | |
| MAPT- | 356 | 740 | 33.5075 | 4.63225652 | 30.232 | 9.588 | 36.783 | 6.407 |
| 6757 | | | | | | | | |
| MAPT- | 357 | 741 | 31.353 | 12.2753737 | 22.673 | 6.04 | 40.033 | 9.561 |
| 6758 | | | | | | | | |
| MAPT- | 358 | 742 | 41.85 | 0.46669048 | 41.52 | 10.866 | 42.18 | 7.164 |
| 6759 | | | | | | | | |
| MAPT- | 359 | 743 | 32.4735 | 18.9158135 | 45.849 | 11.71 | 19.098 | 3.864 |
| 6760 | | | | | | | | |
| MAPT- | 360 | 744 | 45.049 | 19.3718974 | 31.351 | 10.31 | 58.747 | 11.659 |
| 6761 | | | | | | | | |
| MAPT- | 361 | 745 | 38.174 | 8.13031377 | 43.923 | 15.429 | 32.425 | 4.765 |
| 6762 | | | | | | | | |
| MAPT- | 362 | 746 | 53.7735 | 2.06828733 | 52.311 | 15.07 | 55.236 | 8.063 |
| 6763 | | | | | | | | |
| MAPT- | 363 | 747 | 53.1035 | 33.2686669 | 29.579 | 9.81 | 76.628 | 17.226 |
| 6764 | | | | | | | | |
| MAPT- | 364 | 748 | 52.8995 | 16.5795327 | 41.176 | 10.853 | 64.623 | 15.24 |
| 6765 | | | | | | | | |
| MAPT- | 365 | 749 | 49.2605 | 4.00293149 | 52.091 | 10.614 | 46.43 | 16.518 |
| 6766 | | | | | | | | |
| MAPT- | 366 | 750 | 71.423 | 0.85701342 | 72.029 | 26.702 | 70.817 | 16.417 |
| 6767 | | | | | | | | |
| MAPT- | 367 | 751 | 55.4255 | 9.05308812 | 61.827 | 22.465 | 49.024 | 12.369 |
| 6768 | | | | | | | | |
| MAPT- | 368 | 752 | 72.08 | 0.29839906 | 71.869 | 16.441 | 72.291 | 37.177 |
| 6769 | | | | | | | | |
| MAPT- | 369 | 753 | 49.619 | 14.4377063 | 59.828 | 20.675 | 39.41 | 13.235 |
| 6772 | | | | | | | | |
| MAPT- | 370 | 754 | 48.624 | 11.5583674 | 56.797 | 12.783 | 40.451 | 6.391 |
| 6773 | | | | | | | | |
| MAPT- | 371 | 755 | 52.4405 | 31.8855661 | 29.894 | 6.706 | 74.987 | 5.573 |
| 6774 | | | | | | | | |
| MAPT- | 372 | 756 | 28.415 | 6.30456406 | 32.873 | 8.748 | 23.957 | 5.955 |
| 6775 | | | | | | | | |
| MAPT- | 373 | 757 | 39.772 | 4.84509566 | 43.198 | 3.707 | 36.346 | 9.384 |
| 6777 | | | | | | | | |
| MAPT- | 374 | 758 | 50.719 | 5.85342993 | 54.858 | 14.257 | 46.58 | 14.17 |
| 6778 | | | | | | | | |
| MAPT- | 375 | 759 | 35.5865 | 10.7459018 | 43.185 | 6.174 | 27.988 | 3.65 |
| 6779 | | | | | | | | |
| MAPT- | 376 | 760 | 71.501 | 11.9614183 | 79.959 | 23.953 | 63.043 | 14.252 |
| 6780 | | | | | | | | |
| MAPT- | 377 | 761 | 43.875 | 9.50210093 | 37.156 | 6.446 | 50.594 | 8.933 |
| 6781 | | | | | | | | |
| MAPT- | 378 | 762 | 43.4265 | 3.49381461 | 40.956 | 13.993 | 45.897 | 6.518 |
| 6789 | | | | | | | | |
| MAPT- | 379 | 763 | 46.25 | 28.0028427 | 26.449 | 10.778 | 66.051 | 11.602 |
| 6792 | | | | | | | | |
| MAPT- | 380 | 764 | 33.324 | 13.8762635 | 43.136 | 13.663 | 23.512 | 6.983 |
| 6793 | | | | | | | | |
| MAPT- | 381 | 765 | 33.747 | 11.8765655 | 42.145 | 13.155 | 25.349 | 9.4 |
| 6795 | | | | | | | | |
| MAPT- | 382 | 766 | 65.7615 | 8.10556503 | 71.493 | 9.454 | 60.03 | 12.964 |
| 6796 | | | | | | | | |
| MAPT- | 383 | 767 | 55.439 | 15.7302975 | 66.562 | 17.934 | 44.316 | 16.313 |
| 6797 | | | | | | | | |
| MAPT- | 384 | 768 | 50.3055 | 4.55023214 | 47.088 | 13.033 | 53.523 | 13.441 |
| 6798 | | | | | | | | |

### Example 3: GalNAc-Conjugated MAPT RNAi Oligonucleotides Inhibit Human MAPT mRNA Expression In Vivo

[1228] The in vitro screening assays in Example 2 validated the ability of MAPT-targeting oligonucleotides to knockdown target mRNA. To further evaluate the ability of MAPT RNAi oligonucleotides to inhibit MAPT mRNA expression, GalNAc-conjugated MAPT-targeting oligonucleotides were generated to confirm knockdown in vivo.

[1229] Specifically, a subset of the DsiRNAs identified in Example 2 were used to generate corresponding ds RNAi oligonucleotides comprising a nicked tetraloop GalNAc-conjugated structure (referred to herein as “GalNAc-conjugated MAPT oligonucleotides” or “GalNAc-MAPT oligonucleotides”) having a 36-mer sense strand and a 22-mer antisense strand (Tables 4 and 5). Further, the nucleotide sequences comprising the sense strand and antisense strand have a distinct pattern of modified nucleotides and phosphorothioate linkages. Three of the nucleotides comprising the tetraL were each conjugated to a GalNAc moiety (CAS #14131-60-3). The benchmark control (MA-PT-2460) has a different modification pattern than the remaining oligonucleotides. The modification patterns are illustrated below:

Sense Strand:
5′-X-S-mX-fX-mX-fX-mX-mX-fX-mX-fX-mX-fX-fX-mX-fX-
mX-fX-mX-mX-mX-mX-mX-mX-mX-mX-mX-mX-[ademX-
GalNAc]-[ademX-GalNAc]-[ademX-GalNAc]-mX-mX-mX-mX-
mX-mX-3′ hybridized to:
Antisense Strand:
5′-[MePhosphonate-4O-mX]-S-fX-S-fX-fX-fX-mX-fX-mX-
mX-fX-mX-mX-mX-fX-mX-fX-mX-mX-fX-mX-S-mX-S-mX-3′.
(Modification key: Table 3).

[1230] Or, represented as:

Sense Strand:
[mXs][mX][fX][mX][fX][mX][mX][fX][mX][fX][mX][fX]
[fX][mX][fX][mX][fX][mX][mX][X][mX][mX][X][mX][mX]
[mX][mX][ademX-GalNAc][ademX-GalNAc][ademX-GalNAc]
[mX][mX][X][mX][mX][mX] hybridized to:
Antisense Strand:
[MePhosphonate-4O-mXs][fXs][fX][fX][fX][mX][fX]
[mX][mX][fX][mX][mX][mX][fX][mX][fX][mX][mX][fX]
[mXs][mXs][mX].
(Modification key: Table 3).

[1231] Benchmark Modification Pattern

Sense Strand:
5′-mX-S-mX-mX-mX-mX-mX-mX-fX-fX-fX-fX-mX-mX-mX-mX-
mX-mX-mX-mX-mX-mX-mX-mX-mX-mX-mX-mX-[ademX-
GalNAc]-[ademX-GalNAc]-[ademX-GalNAc]-mX-mX-mX-mX-
mX-mX-3′ hybridized to:
Antisense Strand:
5′-[MePhosphonate-4O-mX]-S-fX-S-fX-S-fX-fX-mX-fX-
mX-mX-fX-mX-mX-mX-fX-mX-mX-mX-mX-mX-mX-S-mX-S-mX-
3′. (Modification key: Table 3).

[1232] Or, represented as:

Sense Strand:
[mXs][mX][mX][mX][mX][mX][mX][fX][fX][fX][fX][mX]
[mX][mX][mX][mX][mX][mX][mX][mX][mX][mX][mX][mX]
[mX][mX][mX][ademX-GalNAc][ademX-GalNAc][ademX-
GalNAc][mX][mX][mX][mX][mX][X] hybridized to:
Antisense Strand:
[MePhosphonate-4O-mXs][fXs][fX][fX][fX][X][fX][mX]
[mX][fX][mX][mX][mX][fX][mX][mX][mX][mX][mX][mXs]
[mXs][mX]. (Modification key: Table 3).

TABLE 3
Key for Modification Patterns.

| | |
|---|---|
| Symbol | Modification/linkage |

Key 1

| | |
|---|---|
| mX | 2′-OMe-modified nucleotide |
| fX | 2′-F-modified nucleotide |
| -S- | phosphorothioate linkage |
| - | phosphodiester linkage |
| [MePhosphonate- | 4′-O-monomethylphosphonate-2′-O-methyl modified |
| 4O-mX] | nucleotide |
| ademX-GalNAc | GalNAc attached to a nucleotide |
| ademX-C16 | C₁₆ hydrocarbon chain attached to a nucleotide |

Key 2

| | |
|---|---|
| [mXs] | 2′-OMe-modified nucleotide with a phosphorothioate |
| | linkage to the neighboring nucleotide |
| [fXs] | 2′-F-modified nucleotide with a phosphorothioate |
| | linkage to the neighboring nucleotide |
| [mX] | 2′-OMe-modified nucleotide with phosphodiester |
| | linkages to neighboring nucleotides |
| [fX] | 2′-F-modified nucleotide with phosphodiester linkages |
| | to neighboring nucleotides |
| [ademXs-C16] | C₁₆ hydrocarbon chain attached to a nucleotide with |
| | phosphodiester linkages to neighboring nucleotides |

[1233] The GalNAc-conjugated MAPT-targeting oligonucleotides were used in an HDI model to confirm the ability of the RNAi oligonucleotides to knockdown MAPT gene expression in vivo. The GalNAc-conjugated MAPT-targeting oligonucleotides listed in Tables 4 and 5 were evaluated in mice engineered to transiently express human MAPT mRNA in hepatocytes of the mouse liver. Briefly, 6-8-week-old female CD-i mice (n=4-5) were subcutaneously administered the indicated GalNAc-conjugated MAPT-targeting oligonucleotides at a dose of 3 mg/kg formulated in PBS. A control group of mice (n=5) were administered only PBS. Four days later (96 hours), the mice were HDI with a DNA plasmid encoding the full human MAPT gene (SEQ TD NO: 909) (10 μg) under control of a ubiquitous cytomegalovirus (CMV) promoter sequence. One day after introduction of the DNA plasmid, liver samples from HDI mice were collected. Total RNA derived from these HDI mice were subjected to qRT-PCR analysis to determine human MAPT mRNA levels as described in Example 2. The values were normalized for transfection efficiency using the NeoR gene included on the DNA plasmid. Benchmark controls (MA-PT-2460) were used to confirm successful knock-down.

TABLE 4
GalNAc-Conjugated Human MAPT-Targeting RNAi
Oligonucleotides for HDI Screen (Set I).

| RNAi | SEQ ID NO | SEQ ID NO | SEQ ID NO | SEQ ID NO |
|---|---|---|---|---|
| Oligonucleo- | (Sense) | (Antisense) | (Sense) | (Antisense) |
| tide | Unmodified | | Modified | |
| MAPT-1479 | 787 | 822 | 857 | 892 |
| MAPT-1505 | 788 | 823 | 858 | 893 |
| MAPT-2096 | 789 | 824 | 859 | 894 |
| MAPT-2270 | 790 | 825 | 860 | 895 |
| MAPT-2279 | 791 | 826 | 861 | 896 |
| MAPT-2281 | 792 | 827 | 862 | 897 |
| MAPT-2284 | 793 | 828 | 863 | 898 |
| MAPT-2299 | 794 | 829 | 864 | 899 |
| MAPT-2376 | 795 | 830 | 865 | 900 |
| MAPT-2379 | 796 | 831 | 866 | 901 |
| MAPT-2382 | 797 | 832 | 867 | 902 |
| MAPT-2449 | 798 | 833 | 868 | 903 |
| MAPT-2450 | 799 | 834 | 869 | 904 |
| MAPT-2451 | 800 | 835 | 870 | 905 |
| MAPT-2452 | 801 | 836 | 871 | 906 |
| MAPT-2453 | 802 | 837 | 872 | 907 |
| MAPT-2454 | 803 | 838 | 873 | 908 |
| MAPT-2460 | 786 | 821 | 856 | 891 |

TABLE 5
GalNAc-Conjugated Human MAPT-Targeting RNAi
Oligonucleotides for HDI Screen (Set II).

| RNAi | SEQ ID NO | SEQ ID NO | SEQ ID NO | SEQ ID NO |
|---|---|---|---|---|
| Oligonucleo- | (Sense) | (Antisense) | (Sense) | (Antisense) |
| tide | Unmodified | | Modified | |
| MAPT-2456 | 769 | 804 | 839 | 874 |
| MAPT-2567 | 770 | 805 | 840 | 875 |
| MAPT-2723 | 771 | 806 | 841 | 876 |
| MAPT-0690 | 772 | 807 | 842 | 877 |
| MAPT-1494 | 773 | 808 | 843 | 878 |
| MAPT-1733 | 774 | 809 | 844 | 879 |
| MAPT-2273 | 775 | 810 | 845 | 880 |
| MAPT-2274 | 776 | 811 | 846 | 881 |
| MAPT-2276 | 777 | 812 | 847 | 882 |
| MAPT-2301 | 778 | 813 | 848 | 883 |
| MAPT-2347 | 779 | 814 | 849 | 884 |
| MAPT-2357 | 780 | 815 | 850 | 885 |
| MAPT-2358 | 781 | 816 | 851 | 886 |
| MAPT-2364 | 782 | 817 | 852 | 887 |
| MAPT-2378 | 783 | 818 | 853 | 888 |
| MAPT-2459 | 784 | 819 | 854 | 889 |
| MAPT-2461 | 785 | 820 | 855 | 890 |
| MAPT-2460 | 786 | 821 | 856 | 891 |

[1234] The results in FIGS. 1A and 1B demonstrate that GalNAc-conjugated MAPT-targeting oligonucleotides (as shown in Tables 4 and 5, respectively) designed to target human MAPT mRNA successfully inhibited human MAPT mRNA expression in HDI mice, as determined by a reduction in the amount of human MAPT mRNA expression in liver samples from HDI mice treated with GalNAc-conjugated MAPT-targeting oligonucleotides relative to control HDI mice treated with only PBS.

### Example 4: GalNAc-Conjugated MAPT-Targeting RNAi Oligonucleotides Inhibit Human MAPT Gene Expression in A Dose-Dependent Manner

[1235] To further evaluate the ability of GalNAc-conjugated MAPT-targeting RNAi oligonucleotides to inhibit MAPT gene expression, a dose response study was carried out. Specifically, in separate treatment groups, selected GalNAc-conjugated MAPT-targeting RNAi oligonucleotides (Tables 6 and 7) were formulated in PBS and were administered to CD-1 mice at doses of 0.3 mg/kg, 1 mg/kg, or 3 mg/kg subcutaneously. As described in Example 3, a human MAPT DNA expression plasmid was administered to the mice 4 days post-oligonucleotide dosing, and livers were collected 20 hours later for qRT-PCR analysis. As shown in FIGS. 2A and 2B, all of the GalNAc-conjugated MAPT-targeting RNAi oligonucleotides tested inhibited human MAPT gene expression in a dose-dependent manner. Potent GalNAc-conjugated MAPT-targeting oligonucleotides (i.e., MAPT-2449, MAPT-2357, MAPT-2450, MAPT-2358, MAPT-2454, and MAPT-2723) reduced MAPT mRNA by around 50% or more at 1 mg/kg and even further at 3 mg/kg. These constructs were selected for further studies in NHPs.

TABLE 6
GalNAc-Conjugated Human MAPT-Targeting RNAi
Oligonucleotides for Dose Screen (Set I).

| RNAi | SEQ ID NO | SEQ ID NO | SEQ ID NO | SEQ ID NO |
|---|---|---|---|---|
| Oligonucleo- | (Sense) | (Antisense) | (Sense) | (Antisense) |
| tide | Unmodified | | Modified | |
| MAPT-2270 | 790 | 825 | 860 | 895 |
| MAPT-2376 | 795 | 830 | 865 | 900 |
| MAPT-2449 | 798 | 833 | 868 | 903 |
| MAPT-2450 | 799 | 834 | 869 | 904 |
| MAPT-2454 | 803 | 838 | 873 | 908 |

TABLE 7
GalNAc-Conjugated Human MAPT-Targeting RNAi
Oligonucleotides for Dose Screen (Set II).

| RNAi | SEQ ID NO | SEQ ID NO | SEQ ID NO | SEQ ID NO |
|---|---|---|---|---|
| Oligonucleo- | (Sense) | (Antisense) | (Sense) | (Antisense) |
| tide | Unmodified | | Modified | |
| MAPT-2723 | 771 | 806 | 841 | 876 |
| MAPT-2274 | 776 | 811 | 846 | 881 |
| MAPT-2357 | 780 | 815 | 850 | 885 |
| MAPT-2358 | 781 | 816 | 851 | 886 |
| MAPT-2364 | 782 | 817 | 852 | 887 |

### Example 5: RNAi Oligonucleotide Inhibition of MAPT Gene Expression in NHP CNS

[1236] Effective GalNAc-conjugated MAPT-targeting oligonucleotides identified in the HDI mouse studies were assayed for inhibition in NHP. Specifically, GalNAc-conjugated MAPT-targeting oligonucleotides listed in Table 8 were evaluated in non-naïve cynomolgus monkeys (Macaca fascicularis; Mf). Each cohort contained 4 female subjects weighing 2.6-4.3 kg. The GalNAc-conjugated MAPT-targeting oligonucleotides were administered at a dose of 50 mg in 1.6 mL of artificial cerebrospinal fluid (aCSF) on study days 0 and 7 via intra cisterna magna (i.c.m.) injection.

TABLE 8
GalNAc-Conjugated MAPT-Targeting RNAi
Oligonucleotides for NHP Study.

| | | SEQ | SEQ | SEQ | SEQ |
|---|---|---|---|---|---|
| RNAi | | ID NO | ID NO | ID NO | ID NO |
| Oligonucleo- | Alternate | (Sense) | (Antisense) | (Sense) | (Antisense) |
| tide | name | Unmodified | | Modified | |
| MAPT-2723 | DCR 214 | 771 | 806 | 841 | 876 |
| MAPT-2357 | DCR 211 | 780 | 815 | 850 | 885 |
| MAPT-2358 | DCR 212 | 781 | 816 | 851 | 886 |
| MAPT-2449 | DCR 207 | 798 | 833 | 868 | 903 |
| MAPT-2450 | DCR 208 | 799 | 834 | 869 | 904 |
| MAPT-2454 | DCR 209 | 803 | 838 | 873 | 908 |

[1237] On study day 14, CNS tissue was collected and subjected to qRT-PCR analysis to measure MAPT mRNA in oligonucleotide-treated monkeys relative to those treated with a comparable volume of aCSF. To normalize the data, the measurements were made relative to the reference gene, RPL23. The following SYBR assays purchased from Integrated DNA Technologies were used to evaluate gene expressions:

Forward: AGGACAGAGTGCAGTCGAAGATC;
Reverse: AGGTCAGCTTGTGGGTTTCAA;
and
Probe: CACCCATGTCCCTGGCGGAGG.

[1238] As shown in FIGS. 3A-3M (Day 14), treating NHPs with the GalNAc-conjugated MAPT-targeting oligonucleotides inhibited MAPT gene expression in several regions of the CNS, as determined by a reduced amount of MAPT mRNA in brain samples from oligonucleotide-treated NHPs relative to NHPs treated with aCSF. Several GalNAc-conjugated MAPT-targeting oligonucleotides reduced MAPT gene expression throughout the CNS. MAPT-2357 (DCR 211) was particularly potent in the cervical spinal cord, thoracic spinal cord, lumbar spinal cord, frontal cortex, temporal cortex, occipital cortex, and brain stem. These results demonstrate that treating NHPs with the GalNAc-conjugated MAPT-targeting oligonucleotides reduces the amount of MAPT mRNA in the CNS.

### Example 6: Lipid Conjugation of MAPT-Targeting Oligonucleotides Reduces

[1239] Expression in NHP CNS

[1240] To further investigate the efficacy of oligonucleotides targeting MAPT, a lipid-conjugated oligonucleotide was assessed in NHP compared to a GalNAc-conjugated oligonucleotide. Specifically, the GalNAc-conjugated MAPT-2357 (DCR 211) described in Example 3, having a 36-mer sense strand and 22-mer antisense strand (SEQ ID NOs: 850 and 885, respectively) was compared to a lipid-conjugated MAPT-2357 (DCR 211), having a 20-mer sense strand and 22-mer antisense strand (SEQ ID NOs: 1682 and 885, respectively). FIGS. 4A-4B show the chemical modification patterns of each oligonucleotide, and the chemical modification pattern of the lipid-conjugated oligonucleotide is provided below:

Sense Strand:
5′-[ademX-C16]-S-mX-fX-mX-fX-mX-mX-fX-mX-fX-mX-fX-
fX-mX-fX-mX-fX-mX- S-mX-S-mX-3′ hybridized to:
Antisense Strand:
5′-[MePhosphonate-4O-mX]-S-fX-S-fX-fX-fX-mX-fX-mX-
mX-fX-mX-mX-mX-fX-mX-fX-mX-mX-fX-mX-S-mX-S-mX-3′.
(Modification key: Table 3).

[1241] Or, represented as:

Sense Strand:
[ademXs-C16][mX][fX][mX][fX][mX][mX][fX][mX][fX]
[mX][fX][fX][mX][fX][mX][fX][mXs][mXs][mX]
hybridized to:
Antisense Strand:
[MePhosphonate-4O-mXs][fXs][fX][fX][fX][mX][fX]
[mX][mX][fX][mX][mX][mX][fX][mX][fX][mX][mX][fX]
[mXs][mXs][mX] (Modification key: Table 3).

[1242] Lipid Conjugation

[1243] Conjugation of a lipid moiety to the MAPT-targeting oligonucleotide was carried out using phosphoramidite synthesis as shown below.

### Synthesis of 2-(2-((((6aR,8R,9R,9aR)-8-(6-benzamido-9H-purin-9-vl)-2,2,4,4-tetraisopropyltetrahydro-6H-furo[3,2-f][1,3,5,2,4]trioxadisilocin-9-yl)oxy)methoxy)ethoxy) ethan-1-ammonium formate (1-6)

[chemical structure]

[chemical structure]

[1245] A solution of compound 1-1 (25.00 g, 67.38 mmol) in 20 mL of dimethylformamide (DMF) was treated with pyridine (11 mL, 134.67 mmol) and tetraisopropyldisiloxane dichloride (22.63 mL, 70.75 mmol) at 10° C. The resulting mixture was stirred at 25° C. for 3 hours and quenched with 20% citric acid (50 mL). The aqueous layer was extracted with ethyl acetate (EtOAc; 3×50 mL) and the combined organic layers were concentrated in vacuo. The crude residue was recrystallized from a mixture of methyl tert-butyl ether (MTBE) and n-heptane (1:15, 320 mL) to afford compound 1-2 (37.20 g, 90%) as a white oily solid.

[1246] A solution of compound 1-2 (37.00 g, 60.33 mmol) in 20 mL of DMSO was treated with acetic acid (AcOH; 20 mL, 317.20 mmol) and Ac₂O (15 mL, 156.68 mmol). The mixture was stirred at 25° C. for 15 h. The reaction was diluted with EtOAc (100 mL) and quenched with sat. potassium carbonate (K₂CO₃; 50 mL). The aqueous layer was extracted with EtOAc (3×50 mL). The combined organic layers were concentrated and recrystallized with acetonitrile (can; 30 mL) to afford compound 1-3 (15.65 g, 38.4%) as a white solid.

[1247] A solution of compound 1-3 (20.00 g, 29.72 mmol) in 120 mL of dichloromethane (DCM) was treated with Fmoc-amino-ethoxy ethanol (11.67 g, 35.66 mmol) at 25° C. The mixture was stirred to afford a clear solution and then treated with 4 Å molecular sieves (20.0 g), N-iodosuccinimide (8.02 g, 35.66 mmol), and trifluoromethanesulfonic acid (TfOH; 5.25 mL, 59.44 mmol). The mixture was stirred at 30° C. until the HPLC analysis indicated>95% consumption of compound 1-3. The reaction was quenched with TEA (6 mL) and filtered. The filtrate was diluted with EtOAc, washed with sat. Sodium bicarbonate (NaHCO₃; 2×100 mL), sat. sodium sulfite (Na₂SO₃; 2×100 mL), and water (2×100 mL) and concentrated in vacuo to afford crude compound 1-4 (26.34 g, 93.9%) as a yellow solid, which was used directly for the next step without further purification.

[1248] A solution of compound 1-4 (26.34 g, 27.62 mmol) in a mixture of DCM/water (10:7, 170 mL) was treated with 1,8-diazabicyclo[5.4.0] undec-7-ene (DBU; 7.00 mL, 45.08 mmol) at 5° C. The mixture was stirred at 5-25° C. for 1 hour. The organic layer was then separated, washed with water (100 mL), and diluted with DCM (130 mL). The solution was treated with fumaric acid (7.05 g, 60.76 mmol) and 4 Å molecular sieves (26.34 g) in four portions. The mixture was stirred for 1 hour, concentrated, and recrystallized from a mixture of MTBE and DCM (5:1) to afford compound 1-6 (14.74 g, 62.9%) as a white solid: ¹H NMR (400 MHz, d₆-DMSO) 8.73 (s, 1H), 8.58 (s, 1H), 8.15-8.02 (m, 2H), 7.65-7.60 (m, 1H), 7.59-7.51 (m, 2H), 6.52 (s, 2H), 6.15 (s, 1H), 5.08-4.90 (m, 3H), 4.83-4.78 (m, 1H), 4.15-3.90 (m, 3H), 3.79-3.65 (m, 2H), 2.98-2.85 (m, 6H), 1.20-0.95 (m, 28H).

### Synthesis of (2R,3R,4R,5R)-5-(6-benzamido-9H-purin-9-yl)-2-((bis(4-methoxyphenyl)(phenyl)methoxy)methyl)-4-((2-(2-[lipid]-amidoethoxy)ethoxy)methoxy) tetrahydrofuran-3-vl (2-cyanoethyl) diisopropylphosphoramidite (2-4a to 2-4e)

[chemical structure]

[chemical structure]

[1250] A solution of compound 1-6 (50.00 g, 59.01 mmol) in 150 mL of 2-methyltetrahydrofuran was washed with ice cold aqueous dipotassium hydrogen phosphate (K₂HPO₄; 6%, 100 mL) and brine (20%, 2×100 mL). The organic layer was separated and treated with hexanoic acid (10.33 mL, 82.61 mmol), 1-[bis(dimethylamino)methylene]-1H-1,2,3-triazolo[4,5-b]pyridinium 3-oxide hexafluorophosphate (HATU; 33.66 g, 88.52 mmol), and 4-dimethylaminopyridine (DMAP; 10.81 g, 147.52 mmol) at 0° C. The resulting mixture was warmed to 25° C. and stirred for 1 hour. The solution was washed with water (2×100 mL), brine (100 mL), and concentrated in vacuo to afford a crude residue. Flash chromatography on silica gel (1:1 hexanes/acetone) gave compound 2-1a (34.95 g, 71.5%) as a white solid.

[1251] A mixture of compound 2-1a (34.95 g, 42.19 mmol) and TEA (9.28 mL, 126.58 mmol) in 80 mL of tetrahydrofuran (THF) was treated with triethylamine trihydrofluoride (20.61 mL, 126.58 mmol) dropwise at 10° C. The mixture was warmed to 25° C. and stirred for 2 hours. The reaction was concentrated, dissolved in DCM (100 mL), and washed with sat. NaHCO₃ (5×20 mL) and brine (50 mL). The organic layer was concentrated in vacuo to afford crude compound 2-2a (24.72 g, 99%), which was used directly for the next step without further purification.

[1252] A solution of compound 2-2a (24.72 g, 42.18 mmol) in 50 mL of DCM was treated with N-methylmorpholine (18.54 mL, 168.67 mmol) and DMTr-Cl (15.69 g, 46.38 mmol). The mixture was stirred at 25° C. for 2 hours and quenched with sat. NaHCO₃ (50 mL). The organic layer was separated, washed with water, and concentrated to afford a slurry crude. Flash chromatography on silica gel (1:1 hexanes/acetone) gave compound 2-3a (30.05 g, 33.8 mmol, 79.9%) as a white solid.

[1253] A solution of compound 2-3a (25.00 g, 28.17 mmol) in 50 mL of DCM was treated with N-methylmorpholine (3.10 mL, 28.17 mmol) and tetrazole (0.67 mL, 14.09 mmol) under nitrogen atmosphere. Bis(diisopropylamino) chlorophosphine (9.02 g, 33.80 mmol) was added to the solution dropwise, and the resulting mixture was stirred at 25° C. for 4 hours. The reaction was quenched with water (15 mL), and the aqueous layer was extracted with DCM (3×50 mL). The combined organic layers were washed with sat. NaHCO₃ (50 mL), concentrated to afford a crude solid that was recrystallized from a mixture of DCM/MTBE/n-hexane (1:4:40) to afford compound 2-4a (25.52 g, 83.4%) as a white solid: ¹H NMR (400 MHz, d₆-DMSO) 11.25 (s, 1H), 8.65-8.60 (m, 2H), 8.09-8.02 (m, 2H), 7.71 (s, 1H), 7.67-7.60 (m, 1H), 7.59-7.51 (m, 2H), 7.38-7.34 (m, 2H), 7.30-7.25 (m, 7H), 6.85-6.79 (m, 4H), 6.23-6.20 (m, 1H), 5.23-5.14 (m, 1H), 4.80-4.69 (m, 3H), 4.33-4.23 (m, 2H), 3.90-3.78 (m, 1H), 3.75 (s, 6H), 3.74-3.52 (m, 3H), 3.50-3.20 (m, 6H), 3.14-3.09 (m, 2H), 3.09 (s, 1H), 2.82-2.80 (m, 1H), 2.65-2.60 (m, 1H), 2.05-1.96 (m, 2H), 1.50-1.39 (m, 2H), 1.31-1.10 (m, 14H), 1.08-1.05 (m, 2H), 0.85-0.79 (m, 3H); ³¹P NMR (162 MHz, d₆-DMSO) 149.43, 149.18.

[1254] Compound 2-4b, 2-4c, 2-4d, and 2-4e were prepared using similar procedures described above for compound 2-4a. Compound 2-4b was obtained (25.50 g, 85.4%) as a white solid: ¹H NMR (400 MHz, d₆-DMSO) 11.23 (s, 1H), 8.65-8.60 (m, 2H), 8.05-8.02 (m, 2H), 7.73-7.70 (m, 1H), 7.67-7.60 (m, 1H), 7.59-7.51 (m, 2H), 7.38-7.34 (m, 2H), 7.30-7.25 (m, 7H), 6.89-6.80 (m, 4H), 6.21-6.15 (m, 1H), 5.23-5.17 (m, 1H), 4.80-4.69 (m, 3H), 4.40-4.21 (m, 2H), 3.91-3.80 (m, 1H), 3.74 (s, 6H), 3.74-3.52 (m, 3H), 3.50-3.20 (m, 6H), 3.14-3.09 (m, 2H), 3.09 (s, 1H), 2.83-2.79 (m, 1H), 2.68-2.62 (m, 1H), 2.05-1.97 (m, 2H), 1.50-1.38 (m, 2H), 1.31-1.10 (m, 18H), 1.08-1.05 (m, 2H), 0.85-0.78 (m, 3H); ³¹P NMR (162 MHz, d₆-DMSO) 149.43, 149.19.

[1255] Compound 2-4c was obtained (36.60 g, 66.3%) as an off-white solid: ¹H NMR (400 MHz, d₆-DMSO) 11.22 (s, 1H), 8.64-8.59 (m, 2H), 8.05-8.00 (m, 2H), 7.73-7.70 (m, 1H), 7.67-7.60 (m, 1H), 7.59-7.51 (m, 2H), 7.38-7.34 (m, 2H), 7.30-7.25 (m, 7H), 6.89-6.80 (m, 4H), 6.21-6.15 (m, 1H), 5.25-5.17 (m, 1H), 4.80-4.69 (m, 3H), 4.40-4.21 (m, 2H), 3.91-3.80 (m, 1H), 3.74 (s, 6H), 3.74-3.50 (m, 3H), 3.50-3.20 (m, 6H), 3.14-3.09 (m, 2H), 3.09 (s, 1H), 2.83-2.79 (m, 1H), 2.68-2.62 (m, 1H), 2.05-1.99 (m, 2H), 1.50-1.38 (m, 2H), 1.33-1.12 (m, 38H), 1.08-1.05 (m, 2H), 0.86-0.80 (m, 3H); ³¹P NMR (162 MHz, d₆-DMSO) 149.42, 149.17.

[1256] Compound 2-4d was obtained (26.60 g, 72.9%) as an off-white solid: ¹H NMR (400 MHz, d₆-DMSO) 11.22 (s, 1H), 8.64-8.59 (m, 2H), 8.05-8.00 (m, 2H), 7.73-7.70 (m, 1H), 7.67-7.60 (m, 1H), 7.59-7.51 (m, 2H), 7.38-7.33 (m, 2H), 7.30-7.25 (m, 7H), 6.89-6.80 (m, 4H), 6.21-6.15 (m, 1H), 5.22-5.17 (m, 1H), 4.80-4.69 (m, 3H), 4.40-4.21 (m, 2H), 3.91-3.80 (m, 1H), 3.74 (s, 6H), 3.74-3.52 (m, 3H), 3.50-3.20 (m, 6H), 3.14-3.09 (m, 2H), 3.09 (s, 1H), 2.83-2.79 (m, 1H), 2.68-2.62 (m, 1H), 2.05-1.99 (m, 2H), 1.50-1.38 (m, 2H), 1.35-1.08 (m, 38H), 1.08-1.05 (m, 2H), 0.85-0.79 (m, 3H); ³¹P NMR (162 MHz, d₆-DMSO) 149.47, 149.22.

[1257] Compound 2-4e was obtained (38.10 g, 54.0%) as a white solid: ¹H NMR (400 MHz, d₆-DMSO) 11.21 (s, 1H), 8.64-8.59 (m, 2H), 8.05-8.00 (m, 2H), 7.73-7.70 (m, 1H), 7.67-7.60 (m, 1H), 7.59-7.51 (m, 2H), 7.38-7.34 (m, 2H), 7.30-7.25 (m, 7H), 6.89-6.80 (m, 4H), 6.21-6.15 (m, 1H), 5.23-5.17 (m, 1H), 4.80-4.69 (m, 3H), 4.40-4.21 (m, 2H), 3.91-3.80 (m, 1H), 3.73 (s, 6H), 3.74-3.52 (m, 3H), 3.47-3.22 (m, 6H), 3.14-3.09 (m, 2H), 3.09 (s, 1H), 2.83-2.79 (m, 1H), 2.68-2.62 (m, 1H), 2.05-1.99 (m, 2H), 1.50-1.38 (m, 2H), 1.35-1.06 (m, 46H), 1.08-1.06 (m, 2H), 0.85-0.77 (m, 3H); ³¹P NMR (162 MHz, d₆-DMSO) 149.41, 149.15.

[1258] Lipid-conjugated blunt-ended oligonucleotides described herein were synthesized using a standard procedure known in the literature for oligo synthesis on a synthesizer using amidite chemistry.

[1259] NHP Study

[1260] NHPs (n=4) were intrathecally administered 37.5 mg lipid-conjugated or 45 mg GalNAc-conjugated MAPT-2357 (DCR 211) via lumbar infusion at L1 (see Table 9). Artificial cerebral spinal fluid (aCSF) was used as a control.

TABLE 9
Conjugated MAPTRNAi Oligonucleotides for NHP Study.

| | | | SEQ ID NO | SEQ ID NO | SEQ ID NO | SEQ ID NO |
|---|---|---|---|---|---|---|
| | Alternate | | (Sense) | (Antisense) | (Sense) | (Antisense) |
| RNAi Oligo | Name | Conjugate | Unmodified | | Modified | |
| MAPT-2357 | DCR 211 | C₁₆ | 1681 | 815 | 1682 | 885 |
| MAPT-2357 | DCR 211 | GalNAc | 780 | 815 | 850 | 885 |

[1261] 28 days after administration, CNS tissue was collected to determine the concentration of the oligonucleotide and the level of MAPT gene expression. AD is a chronic neurodegenerative disease characterized by a progressive decline in cognitive abilities such as memory, thinking, language, and learning; whereas, PSP is a less common brain disorder characterized by deterioration in brain regions responsible for movement, coordination, and eventually cognition. Accordingly, CNS tissues associated with AD or PSP were analyzed separately.

[1262] As shown in FIG. 5A, MAPT gene expression was reduced in tissues associated with AD, including the prefrontal cortex, motor cortex, temporal cortex, parietal cortex, and hippocampus, with both lipid-conjugated and GalNAc-conjugated MAPT-2357. Lipid conjugation resulted in a higher reduction of MAPT gene expression compared to GalNAc conjugation. MAPT gene expression was determined as described in the above Examples. FIG. 5B shows a higher concentration of lipid-conjugated MAPT-2357 in the same tissues compared to GalNAc-conjugated MAPT-2357. These results indicate lipid-conjugated MAPT-targeting oligonucleotides have enhanced potency even at a reduced dose compared to GalNAc-conjugated MAPT-targeting oligonucleotides across tissues associated with AD.

[1263] As shown in FIG. 6A, MAPT gene expression was reduced in tissues associated with PSP, including the caudate nucleus, thalamus, midbrain tegmentum, substantia nigra, pons, cerebellar white matter, cerebellar dentate nucleus, medulla, cervical spinal cord, thoracic spinal cord, and lumbar spinal cord with both lipid-conjugated and GalNAc-conjugated MAPT-2357. Lipid-conjugation resulted in a higher reduction of MAPT gene expression compared to GalNAc-conjugation. MAPT gene expression was determined as described in the above Examples. FIG. 6B shows a higher concentration of lipid-conjugated MAPT-2357 in the same tissues compared to GalNAc-conjugated MAPT-2357. These results indicate lipid-conjugated MAPT-targeting oligonucleotides have enhanced potency even at a reduced dose compared to GalNAc-conjugated MAPT-targeting oligonucleotides across tissues associated with PSP.

### SEQUENCE LISTING

[1264] The following nucleic and/or amino acid sequences are referred to in the disclosure and are provided below for reference.

| | | Species | | SEQ |
|---|---|---|---|---|
| | | and | | ID |
| Construct | | location | Sequence | NO |
| MAPT- | 25 mer | 2141-2218- | GAGAACCUGAAGCACCAGCAGGGAG | 1 |
| 2141 | sense | 966 (Hs- | | |
| | strand | Mf-Mm) | | |
| MAPT- | 25 mer | 2142-2219- | AGAACCUGAAGCACCAGCCAGGAGG | 2 |
| 2142 | sense | 967 (Hs- | | |
| | strand | Mf-Mm) | | |
| MAPT- | 25 mer | 2303-2380- | GUGACCUCCAAGUGUGGCUAAUUAG | 3 |
| 2303 | sense | 1128 (Hs- | | |
| | strand | Mf-Mm) | | |
| MAPT- | 25 mer | 2347-2424- | AGGAGGUGGCCAGGUGGAAAUAAAA | 4 |
| 2347 | sense | 1172 (Hs- | | |
| | strand | Mf-Mm) | | |
| MAPT- | 25 mer | 2349-2426- | GAGGUGGCCAGGUGGAAGUAAAATC | 5 |
| 2349 | sense | 1174 (Hs- | | |
| | strand | Mf-Mm) | | |
| MAPT- | 25 mer | 2350-2427- | AGGUGGCCAGGUGGAAGUAAAAUCT | 6 |
| 2350 | sense | 1175 (Hs- | | |
| | strand | Mf-Mm) | | |
| MAPT- | 25 mer | 2351-2428- | GGUGGCCAGGUGGAAGUAAAAUCTG | 7 |
| 2351 | sense | 1176 (Hs- | | |
| | strand | Mf-Mm) | | |
| MAPT- | 25 mer | 2352-2429- | GUGGCCAGGUGGAAGUAAAAUCUGA | 8 |
| 2352 | sense | 1177 (Hs- | | |
| | strand | Mf-Mm) | | |
| MAPT- | 25 mer | 2353-2430- | UGGCCAGGUGGAAGUAAAAACUGAG | 9 |
| 2353 | sense | 1178 (Hs- | | |
| | strand | Mf-Mm) | | |
| MAPT- | 25 mer | 2354-2431- | GGCCAGGUGGAAGUAAAAUAUGAGA | 10 |
| 2354 | sense | 1179 (Hs- | | |
| | strand | Mf-Mm) | | |
| MAPT- | 25 mer | 2355-2432- | GCCAGGUGGAAGUAAAAUCAGAGAA | 11 |
| 2355 | sense | 1180 (Hs- | | |
| | strand | Mf-Mm) | | |
| MAPT- | 25 mer | 2459-2536- | AAGAUUGAAACCCACAAGCAGACCT | 12 |
| 2459 | sense | 1284 (Hs- | | |
| | strand | Mf-Mm) | | |
| MAPT- | 25 mer | 2460-2537- | AGAUUGAAACCCACAAGCUAACCTT | 13 |
| 2460 | sense | 1285 (Hs- | | |
| | strand | Mf-Mm) | | |
| MAPT- | 25 mer | 2461-2538- | GAUUGAAACCCACAAGCUGACCUTC | 14 |
| 2461 | sense | 1286 (Hs- | | |
| | strand | Mf-Mm) | | |
| MAPT- | 25 mer | 2462-2539- | AUUGAAACCCACAAGCUGAACUUCC | 15 |
| 2462 | sense | 1287 (Hs- | | |
| | strand | Mf-Mm) | | |
| MAPT- | 25 mer | 2463-2540- | UUGAAACCCACAAGCUGACAUUCCG | 16 |
| 2463 | sense | 1288 (Hs- | | |
| | strand | Mf-Mm) | | |
| MAPT- | 25 mer | 2464-2541- | UGAAACCCACAAGCUGACCAUCCGC | 17 |
| 2464 | sense | 1289 (Hs- | | |
| | strand | Mf-Mm) | | |
| MAPT- | 25 mer | 2465-2542- | GAAACCCACAAGCUGACCUACCGCG | 18 |
| 2465 | sense | 1290 (Hs- | | |
| | strand | Mf-Mm) | | |
| MAPT- | 25 mer | 2466-2543- | AAACCCACAAGCUGACCUUACGCGA | 19 |
| 2466 | sense | 1291 (Hs- | | |
| | strand | Mf-Mm) | | |
| MAPT- | 25 mer | 2467-2544- | AACCCACAAGCUGACCUUCAGCGAG | 20 |
| 2467 | sense | 1292 (Hs- | | |
| | strand | Mf-Mm) | | |
| MAPT- | 25 mer | 2495-2572- | GCCAAAGCCAAGACAGACCACGGGG | 21 |
| 2495 | sense | 1320 (Hs- | | |
| | strand | Mf-Mm) | | |
| MAPT- | 25 mer | 2496-2573- | CCAAAGCCAAGACAGACCAAGGGGC | 22 |
| 2496 | sense | 1321 (Hs- | | |
| | strand | Mf-Mm) | | |
| MAPT- | 25 mer | 3686-3758- | UCUUUGUAAGGACUUGUGCAUCUTG | 23 |
| 3686 | sense | 2505 (Hs- | | |
| | strand | Mf-Mm) | | |
| MAPT- | 25 mer | 3687-3759- | CUUUGUAAGGACUUGUGCCACUUGG | 24 |
| 3687 | sense | 2506 (Hs- | | |
| | strand | Mf-Mm) | | |
| MAPT- | 25 mer | 3688-3760- | UUUGUAAGGACUUGUGCCUAUUGGG | 25 |
| 3688 | sense | 2507 (Hs- | | |
| | strand | Mf-Mm) | | |
| MAPT- | 25 mer | 3691-3763- | GUAAGGACUUGUGCCUCUUAGGAGA | 26 |
| 3691 | sense | 2510 (Hs- | | |
| | strand | Mf-Mm) | | |
| MAPT- | 25 mer | 3692-3764- | UAAGGACUUGUGCCUCUUGAGAGAC | 27 |
| 3692 | sense | 2511 (Hs- | | |
| | strand | Mf-Mm) | | |
| MAPT- | 25 mer | 3693-3765- | AAGGACUUGUGCCUCUUGGAAGACG | 28 |
| 3693 | sense | 2512 (Hs- | | |
| | strand | Mf-Mm) | | |
| MAPT- | 25 mer | 4534-4605- | GUUGUAGUUGGAUUUGUCUAUUUAT | 29 |
| 4534 | sense | 3332 (Hs- | | |
| | strand | Mf-Mm) | | |
| MAPT- | 25 mer | 4535-4606- | UUGUAGUUGGAUUUGUCUGAUUATG | 30 |
| 4535 | sense | 3333 (Hs- | | |
| | strand | Mf-Mm) | | |
| MAPT- | 25 mer | 4536-4607- | UGUAGUUGGAUUUGUCUGUAUAUGC | 31 |
| 4536 | sense | 3334 (Hs- | | |
| | strand | Mf-Mm) | | |
| MAPT- | 25 mer | 4537-4608- | GUAGUUGGAUUUGUCUGUUAAUGCT | 32 |
| 4537 | sense | 3335 (Hs- | | |
| | strand | Mf-Mm) | | |
| MAPT- | 25 mer | 4538-4609- | UAGUUGGAUUUGUCUGUUUAUGCTT | 33 |
| 4538 | sense | 3336 (Hs- | | |
| | strand | Mf-Mm) | | |
| MAPT- | 25 mer | 4566-4637- | UUCACCAGAGUGACUAUGAAAGUGA | 34 |
| 4566 | sense | 3362 (Hs- | | |
| | strand | Mf-Mm) | | |
| MAPT- | 25 mer | 4567-4638- | UCACCAGAGUGACUAUGAUAGUGAA | 35 |
| 4567 | sense | 3363 (Hs- | | |
| | strand | Mf-Mm) | | |
| MAPT- | 25 mer | 4568-4639- | CACCAGAGUGACUAUGAUAAUGAAA | 36 |
| 4568 | sense | 3364 (Hs- | | |
| | strand | Mf-Mm) | | |
| MAPT- | 25 mer | 4569-4640- | ACCAGAGUGACUAUGAUAGAGAAAA | 37 |
| 4569 | sense | 3365 (Hs- | | |
| | strand | Mf-Mm) | | |
| MAPT- | 25 mer | 4570-4641- | CCAGAGUGACUAUGAUAGUAAAAAG | 38 |
| 4570 | sense | 3366 (Hs- | | |
| | strand | Mf-Mm) | | |
| MAPT- | 25 mer | 4571-4642- | CAGAGUGACUAUGAUAGUGAAAAGA | 39 |
| 4571 | sense | 3367 (Hs- | | |
| | strand | Mf-Mm) | | |
| MAPT- | 25 mer | 4572-4643- | AGAGUGACUAUGAUAGUGAAAAGAA | 40 |
| 4572 | sense | 3368 (Hs- | | |
| | strand | Mf-Mm) | | |
| MAPT- | 25 mer | 4573-4644- | GAGUGACUAUGAUAGUGAAAAGAAA | 41 |
| 4573 | sense | 3369 (Hs- | | |
| | strand | Mf-Mm) | | |
| MAPT- | 25 mer | 4574-4645- | AGUGACUAUGAUAGUGAAAAGAAAA | 42 |
| 4574 | sense | 3370 (Hs- | | |
| | strand | Mf-Mm) | | |
| MAPT- | 25 mer | 4575-4646- | GUGACUAUGAUAGUGAAAAAAAAAA | 43 |
| 4575 | sense | 3371 (Hs- | | |
| | strand | Mf-Mm) | | |
| MAPT- | 25 mer | 4576-4647- | UGACUAUGAUAGUGAAAAGAAAAAA | 44 |
| 4576 | sense | 3372 (Hs- | | |
| | strand | Mf-Mm) | | |
| MAPT- | 25 mer | 4577-4648- | GACUAUGAUAGUGAAAAGAAAAAAA | 45 |
| 4577 | sense | 3373 (Hs- | | |
| | strand | Mf-Mm) | | |
| MAPT- | 25 mer | 4578-4649- | ACUAUGAUAGUGAAAAGAAAAAAAA | 46 |
| 4578 | sense | 3374 (Hs- | | |
| | strand | Mf-Mm) | | |
| MAPT- | 25 mer | 4579-4650- | CUAUGAUAGUGAAAAGAAAAAAAAA | 47 |
| 4579 | sense | 3375 (Hs- | | |
| | strand | Mf-Mm) | | |
| MAPT- | 25 mer | 4580-4651- | UAUGAUAGUGAAAAGAAAAAAAAAA | 48 |
| 4580 | sense | 3376 (Hs- | | |
| | strand | Mf-Mm) | | |
| MAPT- | 25 mer | 4605-4677- | AAAAAAAAGGACGCAUGUAACUUGA | 49 |
| 4605 | sense | 3439 (Hs- | | |
| | strand | Mf-Mm) | | |
| MAPT- | 25 mer | 4606-4678- | AAAAAAAGGACGCAUGUAUAUUGAA | 50 |
| 4606 | sense | 3440 (Hs- | | |
| | strand | Mf-Mm) | | |
| MAPT- | 25 mer | 4607-4679- | AAAAAAGGACGCAUGUAUCAUGAAA | 51 |
| 4607 | sense | 3441 (Hs- | | |
| | strand | Mf-Mm) | | |
| MAPT- | 25 mer | 4608-4680- | AAAAAGGACGCAUGUAUCUAGAAAT | 52 |
| 4608 | sense | 3442 (Hs- | | |
| | strand | Mf-Mm) | | |
| MAPT- | 25 mer | 4609-4681- | AAAAGGACGCAUGUAUCUUAAAATG | 53 |
| 4609 | sense | 3443 (Hs- | | |
| | strand | Mf-Mm) | | |
| MAPT- | 25 mer | 4610-4682- | AAAGGACGCAUGUAUCUUGAAAUGC | 54 |
| 4610 | sense | 3444 (Hs- | | |
| | strand | Mf-Mm) | | |
| MAPT- | 25 mer | 4611-4683- | AAGGACGCAUGUAUCUUGAAAUGCT | 55 |
| 4611 | sense | 3445 (Hs- | | |
| | strand | Mf-Mm) | | |
| MAPT- | 25 mer | 4612-4684- | AGGACGCAUGUAUCUUGAAAUGCTT | 56 |
| 4612 | sense | 3446 (Hs- | | |
| | strand | Mf-Mm) | | |
| MAPT- | 25 mer | 4613-4685- | GGACGCAUGUAUCUUGAAAAGCUTG | 57 |
| 4613 | sense | 3447 (Hs- | | |
| | strand | Mf-Mm) | | |
| MAPT- | 25 mer | 4614-4686- | GACGCAUGUAUCUUGAAAUACUUGT | 58 |
| 4614 | sense | 3448 (Hs- | | |
| | strand | Mf-Mm) | | |
| MAPT- | 25 mer | 5969-6024- | UCACUUUAUCAAUAGUUCCAUUUAA | 59 |
| 5969 | sense | 4540 (Hs- | | |
| | strand | Mf-Mm) | | |
| MAPT- | 25 mer | 5970-6025- | CACUUUAUCAAUAGUUCCAAUUAAA | 60 |
| 5970 | sense | 4541 (Hs- | | |
| | strand | Mf-Mm) | | |
| MAPT- | 25 mer | 5971-6026- | ACUUUAUCAAUAGUUCCAUAUAAAT | 61 |
| 5971 | sense | 4542 (Hs- | | |
| | strand | Mf-Mm) | | |
| MAPT- | 25 mer | 5972-6027- | CUUUAUCAAUAGUUCCAUUAAAATT | 62 |
| 5972 | sense | 4543 (Hs- | | |
| | strand | Mf-Mm) | | |
| MAPT- | 25 mer | 5973-6028- | UUUAUCAAUAGUUCCAUUUAAAUTG | 63 |
| 5973 | sense | 4544 (Hs- | | |
| | strand | Mf-Mm) | | |
| MAPT- | 25 mer | 5974-6029- | UUAUCAAUAGUUCCAUUUAAAUUGA | 64 |
| 5974 | sense | 4545 (Hs- | | |
| | strand | Mf-Mm) | | |
| MAPT- | 25 mer | 5975-6030- | UAUCAAUAGUUCCAUUUAAAUUGAC | 65 |
| 5975 | sense | 4546 (Hs- | | |
| | strand | Mf-Mm) | | |
| MAPT- | 25 mer | 5976-6031- | AUCAAUAGUUCCAUUUAAAAUGACT | 66 |
| 5976 | sense | 4547 (Hs- | | |
| | strand | Mf-Mm) | | |
| MAPT- | 25 mer | 5977-6032- | UCAAUAGUUCCAUUUAAAUAGACTT | 67 |
| 5977 | sense | 4548 (Hs- | | |
| | strand | Mf-Mm) | | |
| MAPT- | 25 mer | 5978-6033- | CAAUAGUUCCAUUUAAAUUAACUTC | 68 |
| 5978 | sense | 4549 (Hs- | | |
| | strand | Mf-Mm) | | |
| MAPT- | 25 mer | 5979-6034- | AAUAGUUCCAUUUAAAUUGACUUCA | 69 |
| 5979 | sense | 4550 (Hs- | | |
| | strand | Mf-Mm) | | |
| MAPT- | 25 mer | 5980-6035- | AUAGUUCCAUUUAAAUUGAAUUCAG | 70 |
| 5980 | sense | 4551 (Hs- | | |
| | strand | Mf-Mm) | | |
| MAPT- | 25 mer | 5981-6036- | UAGUUCCAUUUAAAUUGACAUCAGT | 71 |
| 5981 | sense | 4552 (Hs- | | |
| | strand | Mf-Mm) | | |
| MAPT- | 25 mer | 5982-6037- | AGUUCCAUUUAAAUUGACUACAGTG | 72 |
| 5982 | sense | 4553 (Hs- | | |
| | strand | Mf-Mm) | | |
| MAPT- | 25 mer | 5983-6038- | GUUCCAUUUAAAUUGACUUAAGUGG | 73 |
| 5983 | sense | 4554 (Hs- | | |
| | strand | Mf-Mm) | | |
| MAPT- | 25 mer | 5984-6039- | UUCCAUUUAAAUUGACUUCAGUGGT | 74 |
| 5984 | sense | 4555 (Hs- | | |
| | strand | Mf-Mm) | | |
| MAPT- | 25 mer | 5985-6040- | UCCAUUUAAAUUGACUUCAAUGGTG | 75 |
| 5985 | sense | 4556 (Hs- | | |
| | strand | Mf-Mm) | | |
| MAPT- | 25 mer | 6662-6723- | CUUGCAAGUCCCAUGAUUUAUUCGG | 76 |
| 6662 | sense | 5230 (Hs- | | |
| | strand | Mf-Mm) | | |
| MAPT- | 25 mer | 6663-6724- | UUGCAAGUCCCAUGAUUUCAUCGGT | 77 |
| 6663 | sense | 5231 (Hs- | | |
| | strand | Mf-Mm) | | |
| MAPT- | 25 mer | 6664-6725- | UGCAAGUCCCAUGAUUUCUACGGTA | 78 |
| 6664 | sense | 5232 (Hs- | | |
| | strand | Mf-Mm) | | |
| MAPT- | 25 mer | 6665-6726- | GCAAGUCCCAUGAUUUCUUAGGUAA | 79 |
| 6665 | sense | 5233 (Hs- | | |
| | strand | Mf-Mm) | | |
| MAPT- | 25 mer | 6800-6861- | GUAAAAGUGAAUUUGGAAAAAAAGT | 80 |
| 6800 | sense | 5365 (Hs- | | |
| | strand | Mf-Mm) | | |
| MAPT- | 25 mer | 6801-6862- | UAAAAGUGAAUUUGGAAAUAAAGTT | 81 |
| 6801 | sense | 5366 (Hs- | | |
| | strand | Mf-Mm) | | |
| MAPT- | 25 mer | 6802-6863- | AAAAGUGAAUUUGGAAAUAAAGUTA | 82 |
| 6802 | sense | 5367 (Hs- | | |
| | strand | Mf-Mm) | | |
| MAPT- | 25 mer | 6803-6864- | AAAGUGAAUUUGGAAAUAAAGUUAT | 83 |
| 6803 | sense | 5368 (Hs- | | |
| | strand | Mf-Mm) | | |
| MAPT- | 25 mer | 6804-6865- | AAGUGAAUUUGGAAAUAAAAUUATT | 84 |
| 6804 | sense | 5369 (Hs- | | |
| | strand | Mf-Mm) | | |
| MAPT- | 25 mer | 6805-6866- | AGUGAAUUUGGAAAUAAAGAUAUTA | 85 |
| 6805 | sense | 5370 (Hs- | | |
| | strand | Mf-Mm) | | |
| MAPT- | 25 mer | 6806-6867- | GUGAAUUUGGAAAUAAAGUAAUUAC | 86 |
| 6806 | sense | 5371 (Hs- | | |
| | strand | Mf-Mm) | | |
| MAPT- | 25 mer | 6807-6868- | UGAAUUUGGAAAUAAAGUUAUUACT | 87 |
| 6807 | sense | 5372 (Hs- | | |
| | strand | Mf-Mm) | | |
| MAPT- | 25 mer | 6808-6869- | GAAUUUGGAAAUAAAGUUAAUACTC | 88 |
| 6808 | sense | 5373 (Hs- | | |
| | strand | Mf-Mm) | | |
| MAPT- | 25 mer | 6809-6870- | AAUUUGGAAAUAAAGUUAUAACUCT | 89 |
| 6809 | sense | 5374 (Hs- | | |
| | strand | Mf-Mm) | | |
| MAPT- | 25 mer | 6810-6871- | AUUUGGAAAUAAAGUUAUUACUCTG | 90 |
| 6810 | sense | 5375 (Hs- | | |
| | strand | Mf-Mm) | | |
| MAPT- | 25 mer | 6811-6872- | UUUGGAAAUAAAGUUAUUAAUCUGA | 91 |
| 6811 | sense | 5376 (Hs- | | |
| | strand | Mf-Mm) | | |
| MAPT- | 25 mer | 6812-6873- | UUGGAAAUAAAGUUAUUACACUGAT | 92 |
| 6812 | sense | 5377 (Hs- | | |
| | strand | Mf-Mm) | | |
| MAPT- | 25 mer | 6813-6874- | UGGAAAUAAAGUUAUUACUAUGATT | 93 |
| 6813 | sense | 5378 (Hs- | | |
| | strand | Mf-Mm) | | |
| MAPT- | 25 mer | 6814-6875- | GGAAAUAAAGUUAUUACUCAGAUTA | 94 |
| 6814 | sense | 5379 (Hs- | | |
| | strand | Mf-Mm) | | |
| MAPT- | 25 mer | 6815-6876- | GAAAUAAAGUUAUUACUCUAAUUAA | 95 |
| 6815 | sense | 5380 (Hs- | | |
| | strand | Mf-Mm) | | |
| MAPT- | 25 mer | 6816-6877- | AAAUAAAGUUAUUACUCUGAUUAAA | 96 |
| 6816 | sense | 5381 (Hs- | | |
| | strand | Mf-Mm) | | |
| MAPT- | 25 mer | 363 (Hs) | AGGAGUUCGAAGUGAUGGAAGAUCA | 97 |
| 363 | sense | | | |
| | strand | | | |
| MAPT- | 25 mer | 364 (Hs) | GGAGUUCGAAGUGAUGGAAAAUCAC | 98 |
| 364 | sense | | | |
| | strand | | | |
| MAPT- | 25 mer | 365 (Hs) | GAGUUCGAAGUGAUGGAAGAUCACG | 99 |
| 365 | sense | | | |
| | strand | | | |
| MAPT- | 25 mer | 367 (Hs) | GUUCGAAGUGAUGGAAGAUAACGCT | 100 |
| 367 | sense | | | |
| | strand | | | |
| MAPT- | 25 mer | 369 (Hs) | UCGAAGUGAUGGAAGAUCAAGCUGG | 101 |
| 369 | sense | | | |
| | strand | | | |
| MAPT- | 25 mer | 374-226 | GUGAUGGAAGAUCACGCUGAGACGT | 102 |
| 374 | sense | (Hs-Mf) | | |
| | strand | | | |
| MAPT- | 25 mer | 395-247 | ACGUACGGGUUGGGGGACAAGAAAG | 103 |
| 395 | sense | (Hs-Mf) | | |
| | strand | | | |
| MAPT- | 25 mer | 400-252 | CGGGUUGGGGGACAGGAAAAAUCAG | 104 |
| 400 | sense | (Hs-Mf) | | |
| | strand | | | |
| MAPT- | 25 mer | 443-295 | CAAGACCAAGAGGGUGACAAGGACG | 105 |
| 443 | sense | (Hs-Mf) | | |
| | strand | | | |
| MAPT- | 25 mer | 688-453 | GGAAGACGAAGCUGCUGGUAACGTG | 106 |
| 688 | sense | (Hs-Mf) | | |
| | strand | | | |
| MAPT- | 25 mer | 689-454 | GAAGACGAAGCUGCUGGUCACGUGA | 107 |
| 689 | sense | (Hs-Mf) | | |
| | strand | | | |
| MAPT- | 25 mer | 690-455 | AAGACGAAGCUGCUGGUCAAGUGAC | 108 |
| 690 | sense | (Hs-Mf) | | |
| | strand | | | |
| MAPT- | 25 mer | 693-458 | ACGAAGCUGCUGGUCACGUAACCCA | 109 |
| 693 | sense | (Hs-Mf) | | |
| | strand | | | |
| MAPT- | 25 mer | 695-460 | GAAGCUGCUGGUCACGUGAACCAAG | 110 |
| 695 | sense | (Hs-Mf) | | |
| | strand | | | |
| MAPT- | 25 mer | 696-461 | AAGCUGCUGGUCACGUGACACAAGA | 111 |
| 696 | sense | (Hs-Mf) | | |
| | strand | | | |
| MAPT- | 25 mer | 1475-1552 | CGCAUGGUCAGUAAAAGCAAAGACG | 112 |
| 1475 | sense | (Hs-Mf) | | |
| | strand | | | |
| MAPT- | 25 mer | 1476-1553 | GCAUGGUCAGUAAAAGCAAAGACGG | 113 |
| 1476 | sense | (Hs-Mf) | | |
| | strand | | | |
| MAPT- | 25 mer | 1479-1556 | UGGUCAGUAAAAGCAAAGAAGGGAC | 114 |
| 1479 | sense | (Hs-Mf) | | |
| | strand | | | |
| MAPT- | 25 mer | 1480-1557 | GGUCAGUAAAAGCAAAGACAGGACT | 115 |
| 1480 | sense | (Hs-Mf) | | |
| | strand | | | |
| MAPT- | 25 mer | 1481-1558 | GUCAGUAAAAGCAAAGACGAGACTG | 116 |
| 1481 | sense | (Hs-Mf) | | |
| | strand | | | |
| MAPT- | 25 mer | 1484-1561 | AGUAAAAGCAAAGACGGGAAUGGAA | 117 |
| 1484 | sense | (Hs-Mf) | | |
| | strand | | | |
| MAPT- | 25 mer | 1485-1562 | GUAAAAGCAAAGACGGGACAGGAAG | 118 |
| 1485 | sense | (Hs-Mf) | | |
| | strand | | | |
| MAPT- | 25 mer | 1492-1569 | CAAAGACGGGACUGGAAGCAAUGAC | 119 |
| 1492 | sense | (Hs-Mf) | | |
| | strand | | | |
| MAPT- | 25 mer | 1494-1571 | AAGACGGGACUGGAAGCGAAGACAA | 120 |
| 1494 | sense | (Hs-Mf) | | |
| | strand | | | |
| MAPT- | 25 mer | 1495-1572 | AGACGGGACUGGAAGCGAUAACAAA | 121 |
| 1495 | sense | (Hs-Mf) | | |
| | strand | | | |
| MAPT- | 25 mer | 1498-1575 | CGGGACUGGAAGCGAUGACAAAAAA | 122 |
| 1498 | sense | (Hs-Mf) | | |
| | strand | | | |
| MAPT- | 25 mer | 1499-1576 | GGGACUGGAAGCGAUGACAAAAAAG | 123 |
| 1499 | sense | (Hs-Mf) | | |
| | strand | | | |
| MAPT- | 25 mer | 1500-1577 | GGACUGGAAGCGAUGACAAAAAAGC | 124 |
| 1500 | sense | (Hs-Mf) | | |
| | strand | | | |
| MAPT- | 25 mer | 1502-1579 | ACUGGAAGCGAUGACAAAAAAGCCA | 125 |
| 1502 | sense | (Hs-Mf) | | |
| | strand | | | |
| MAPT- | 25 mer | 1503-1580 | CUGGAAGCGAUGACAAAAAAGCCAA | 126 |
| 1503 | sense | (Hs-Mf) | | |
| | strand | | | |
| MAPT- | 25 mer | 1504-1581 | UGGAAGCGAUGACAAAAAAACCAAG | 127 |
| 1504 | sense | (Hs-Mf) | | |
| | strand | | | |
| MAPT- | 25 mer | 1505-1582 | GGAAGCGAUGACAAAAAAGACAAGA | 128 |
| 1505 | sense | (Hs-Mf) | | |
| | strand | | | |
| MAPT- | 25 mer | 1506-1583 | GAAGCGAUGACAAAAAAGCAAAGAC | 129 |
| 1506 | sense | (Hs-Mf) | | |
| | strand | | | |
| MAPT- | 25 mer | 1507-1584 | AAGCGAUGACAAAAAAGCCAAGACA | 130 |
| 1507 | sense | (Hs-Mf) | | |
| | strand | | | |
| MAPT- | 25 mer | 1508-1585 | AGCGAUGACAAAAAAGCCAAGACAT | 131 |
| 1508 | sense | (Hs-Mf) | | |
| | strand | | | |
| MAPT- | 25 mer | 1509-1586 | GCGAUGACAAAAAAGCCAAAACATC | 132 |
| 1509 | sense | (Hs-Mf) | | |
| | strand | | | |
| MAPT- | 25 mer | 1733 (Hs) | GAUGGUAAAACGAAGAUCGACACAC | 133 |
| 1733 | sense | | | |
| | strand | | | |
| MAPT- | 25 mer | 1796-1873 | AACGCCACCAGGAUUCCAGAAAAAA | 134 |
| 1796 | sense | (Hs-Mf) | | |
| | strand | | | |
| MAPT- | 25 mer | 1835-1912 | AAGACACCACCCAGCUCUGAGACTA | 135 |
| 1835 | sense | (Hs-Mf) | | |
| | strand | | | |
| MAPT- | 25 mer | 1912-1989 | ACCUCCAAAAUCAGGGGAUAGCAGC | 136 |
| 1912 | sense | (Hs-Mf) | | |
| | strand | | | |
| MAPT- | 25 mer | 2094-2171 | UGCCCAUGCCAGACCUGAAAAAUGT | 137 |
| 2094 | sense | (Hs-Mf) | | |
| | strand | | | |
| MAPT- | 25 mer | 2096-2173 | CCCAUGCCAGACCUGAAGAAUGUCA | 138 |
| 2096 | sense | (Hs-Mf) | | |
| | strand | | | |
| MAPT- | 25 mer | 2097-2174 | CCAUGCCAGACCUGAAGAAAGUCAA | 139 |
| 2097 | sense | (Hs-Mf) | | |
| | strand | | | |
| MAPT- | 25 mer | 2098 (Hs) | CAUGCCAGACCUGAAGAAUAUCAAG | 140 |
| 2098 | sense | | | |
| | strand | | | |
| MAPT- | 25 mer | 2105 (Hs) | GACCUGAAGAAUGUCAAGUACAAGA | 141 |
| 2105 | sense | | | |
| | strand | | | |
| MAPT- | 25 mer | 2106 (Hs) | ACCUGAAGAAUGUCAAGUCAAAGAT | 142 |
| 2106 | sense | | | |
| | strand | | | |
| MAPT- | 25 mer | 2107 (Hs) | CCUGAAGAAUGUCAAGUCCAAGATC | 143 |
| 2107 | sense | | | |
| | strand | | | |
| MAPT- | 25 mer | 2108 (Hs) | CUGAAGAAUGUCAAGUCCAAGAUCG | 144 |
| 2108 | sense | | | |
| | strand | | | |
| MAPT- | 25 mer | 2109 (Hs) | UGAAGAAUGUCAAGUCCAAAAUCGG | 145 |
| 2109 | sense | | | |
| | strand | | | |
| MAPT- | 25 mer | 2117-2194 | GUCAAGUCCAAGAUCGGCUACACTG | 146 |
| 2117 | sense | (Hs-Mf) | | |
| | strand | | | |
| MAPT- | 25 mer | 2136 (Hs) | CCACUGAGAACCUGAAGCAACAGCC | 147 |
| 2136 | sense | | | |
| | strand | | | |
| MAPT- | 25 mer | 2137 (Hs) | CACUGAGAACCUGAAGCACAAGCCG | 148 |
| 2137 | sense | | | |
| | strand | | | |
| MAPT- | 25 mer | 2269-2346 | GCAAAUAGUCUACAAACCAAUUGAC | 149 |
| 2269 | sense | (Hs-Mf) | | |
| | strand | | | |
| MAPT- | 25 mer | 2270-2347 | CAAAUAGUCUACAAACCAGAUGACC | 150 |
| 2270 | sense | (Hs-Mf) | | |
| | strand | | | |
| MAPT- | 25 mer | 2271-2348 | AAAUAGUCUACAAACCAGUAGACCT | 151 |
| 2271 | sense | (Hs-Mf) | | |
| | strand | | | |
| MAPT- | 25 mer | 2272-2349 | AAUAGUCUACAAACCAGUUAACCTG | 152 |
| 2272 | sense | (Hs-Mf) | | |
| | strand | | | |
| MAPT- | 25 mer | 2273-2350 | AUAGUCUACAAACCAGUUGACCUGA | 153 |
| 2273 | sense | (Hs-Mf) | | |
| | strand | | | |
| MAPT- | 25 mer | 2274-2351 | UAGUCUACAAACCAGUUGAACUGAG | 154 |
| 2274 | sense | (Hs-Mf) | | |
| | strand | | | |
| MAPT- | 25 mer | 2275-2352 | AGUCUACAAACCAGUUGACAUGAGC | 155 |
| 2275 | sense | (Hs-Mf) | | |
| | strand | | | |
| MAPT- | 25 mer | 2276-2353 | GUCUACAAACCAGUUGACCAGAGCA | 156 |
| 2276 | sense | (Hs-Mf) | | |
| | strand | | | |
| MAPT- | 25 mer | 2277-2354 | UCUACAAACCAGUUGACCUAAGCAA | 157 |
| 2277 | sense | (Hs-Mf) | | |
| | strand | | | |
| MAPT- | 25 mer | 2278-2355 | CUACAAACCAGUUGACCUGAGCAAG | 158 |
| 2278 | sense | (Hs-Mf) | | |
| | strand | | | |
| MAPT- | 25 mer | 2279-2356 | UACAAACCAGUUGACCUGAACAAGG | 159 |
| 2279 | sense | (Hs-Mf) | | |
| | strand | | | |
| MAPT- | 25 mer | 2280-2357 | ACAAACCAGUUGACCUGAGAAAGGT | 160 |
| 2280 | sense | (Hs-Mf) | | |
| | strand | | | |
| MAPT- | 25 mer | 2281-2358 | CAAACCAGUUGACCUGAGCAAGGTG | 16 |
| 2281 | sense | (Hs-Mf) | | |
| | strand | | | |
| MAPT- | 25 mer | 2282-2359 | AAACCAGUUGACCUGAGCAAGGUGA | 162 |
| 2282 | sense | (Hs-Mf) | | |
| | strand | | | |
| MAPT- | 25 mer | 2283-2360 | AACCAGUUGACCUGAGCAAAGUGAC | 163 |
| 2283 | sense | (Hs-Mf) | | |
| | strand | | | |
| MAPT- | 25 mer | 2284-2361 | ACCAGUUGACCUGAGCAAGAUGACC | 164 |
| 2284 | sense | (Hs-Mf) | | |
| | strand | | | |
| MAPT- | 25 mer | 2286-2363 | CAGUUGACCUGAGCAAGGUAACCTC | 165 |
| 2286 | sense | (Hs-Mf) | | |
| | strand | | | |
| MAPT- | 25 mer | 2288-2365 | GUUGACCUGAGCAAGGUGAACUCCA | 166 |
| 2288 | sense | (Hs-Mf) | | |
| | strand | | | |
| MAPT- | 25 mer | 2289-2366 | UUGACCUGAGCAAGGUGACAUCCAA | 167 |
| 2289 | sense | (Hs-Mf) | | |
| | strand | | | |
| MAPT- | 25 mer | 2291-2368 | GACCUGAGCAAGGUGACCUACAAGT | 168 |
| 2291 | sense | (Hs-Mf) | | |
| | strand | | | |
| MAPT- | 25 mer | 2294-2371 | CUGAGCAAGGUGACCUCCAAGUGTG | 169 |
| 2294 | sense | (Hs-Mf) | | |
| | strand | | | |
| MAPT- | 25 mer | 2299-2376 | CAAGGUGACCUCCAAGUGUAGCUCA | 170 |
| 2299 | sense | (Hs-Mf) | | |
| | strand | | | |
| MAPT- | 25 mer | 2300-2377 | AAGGUGACCUCCAAGUGUGACUCAT | 171 |
| 2300 | sense | (Hs-Mf) | | |
| | strand | | | |
| MAPT- | 25 mer | 2301-2378 | AGGUGACCUCCAAGUGUGGAUCATT | 172 |
| 2301 | sense | (Hs-Mf) | | |
| | strand | | | |
| MAPT- | 25 mer | 2308-2385 | CUCCAAGUGUGGCUCAUUAAGCAAC | 173 |
| 2308 | sense | (Hs-Mf) | | |
| | strand | | | |
| MAPT- | 25 mer | 2316-2393 | GUGGCUCAUUAGGCAACAUACAUCA | 174 |
| 2316 | sense | (Hs-Mf) | | |
| | strand | | | |
| MAPT- | 25 mer | 2317-2394 | UGGCUCAUUAGGCAACAUCAAUCAT | 175 |
| 2317 | sense | (Hs-Mf) | | |
| | strand | | | |
| MAPT- | 25 mer | 2319-2396 | GCUCAUUAGGCAACAUCCAACAUAA | 176 |
| 2319 | sense | (Hs-Mf) | | |
| | strand | | | |
| MAPT- | 25 mer | 2320-2397 | CUCAUUAGGCAACAUCCAUAAUAAA | 177 |
| 2320 | sense | (Hs-Mf) | | |
| | strand | | | |
| MAPT- | 25 mer | 2322-2399 | CAUUAGGCAACAUCCAUCAAAAACC | 178 |
| 2322 | sense | (Hs-Mf) | | |
| | strand | | | |
| MAPT- | 25 mer | 2323-2400 | AUUAGGCAACAUCCAUCAUAAACCA | 179 |
| 2323 | sense | (Hs-Mf) | | |
| | strand | | | |
| MAPT- | 25 mer | 2324-2401 | UUAGGCAACAUCCAUCAUAAACCAG | 180 |
| 2324 | sense | (Hs-Mf) | | |
| | strand | | | |
| MAPT- | 25 mer | 2326-2403 | AGGCAACAUCCAUCAUAAAACAGGA | 181 |
| 2326 | sense | (Hs-Mf) | | |
| | strand | | | |
| MAPT- | 25 mer | 2330-2407 | AACAUCCAUCAUAAACCAGAAGGTG | 182 |
| 2330 | sense | (Hs-Mf) | | |
| | strand | | | |
| MAPT- | 25 mer | 2356-2433 | CCAGGUGGAAGUAAAAUCUAAGAAG | 183 |
| 2356 | sense | (Hs-Mf) | | |
| | strand | | | |
| MAPT- | 25 mer | 2357-2434 | CAGGUGGAAGUAAAAUCUGAGAAGC | 184 |
| 2357 | sense | (Hs-Mf) | | |
| | strand | | | |
| MAPT- | 25 mer | 2358-2435 | AGGUGGAAGUAAAAUCUGAAAAGCT | 185 |
| 2358 | sense | (Hs-Mf) | | |
| | strand | | | |
| MAPT- | 25 mer | 2359-2436 | GGUGGAAGUAAAAUCUGAGAAGCTT | 186 |
| 2359 | sense | (Hs-Mf) | | |
| | strand | | | |
| MAPT- | 25 mer | 2360-2437 | GUGGAAGUAAAAUCUGAGAAGCUTG | 187 |
| 2360 | sense | (Hs-Mf) | | |
| | strand | | | |
| MAPT- | 25 mer | 2361-2438 | UGGAAGUAAAAUCUGAGAAACUUGA | 188 |
| 2361 | sense | (Hs-Mf) | | |
| | strand | | | |
| MAPT- | 25 mer | 2362-2439 | GGAAGUAAAAUCUGAGAAGAUUGAC | 189 |
| 2362 | sense | (Hs-Mf) | | |
| | strand | | | |
| MAPT- | 25 mer | 2363-2440 | GAAGUAAAAUCUGAGAAGCAUGACT | 190 |
| 2363 | sense | (Hs-Mf) | | |
| | strand | | | |
| MAPT- | 25 mer | 2364-2441 | AAGUAAAAUCUGAGAAGCUAGACTT | 191 |
| 2364 | sense | (Hs-Mf) | | |
| | strand | | | |
| MAPT- | 25 mer | 2365 (Hs) | AGUAAAAUCUGAGAAGCUUAACUTC | 192 |
| 2365 | sense | | | |
| | strand | | | |
| MAPT- | 25 mer | 2372 (Hs) | UCUGAGAAGCUUGACUUCAAGGACA | 193 |
| 2372 | sense | | | |
| | strand | | | |
| MAPT- | 25 mer | 2373 (Hs) | CUGAGAAGCUUGACUUCAAAGACAG | 194 |
| 2373 | sense | | | |
| | strand | | | |
| MAPT- | 25 mer | 2374 (Hs) | UGAGAAGCUUGACUUCAAGAACAGA | 195 |
| 2374 | sense | | | |
| | strand | | | |
| MAPT- | 25 mer | 2375 (Hs) | GAGAAGCUUGACUUCAAGGACAGAG | 196 |
| 2375 | sense | | | |
| | strand | | | |
| MAPT- | 25 mer | 2376 (Hs) | AGAAGCUUGACUUCAAGGAAAGAGT | 197 |
| 2376 | sense | | | |
| | strand | | | |
| MAPT- | 25 mer | 2377 (Hs) | GAAGCUUGACUUCAAGGACAGAGTC | 198 |
| 2377 | sense | | | |
| | strand | | | |
| MAPT- | 25 mer | 2378 (Hs) | AAGCUUGACUUCAAGGACAAAGUCC | 199 |
| 2378 | sense | | | |
| | strand | | | |
| MAPT- | 25 mer | 2379 (Hs) | AGCUUGACUUCAAGGACAGAGUCCA | 200 |
| 2379 | sense | | | |
| | strand | | | |
| MAPT- | 25 mer | 2380 (Hs) | GCUUGACUUCAAGGACAGAAUCCAG | 201 |
| 2380 | sense | | | |
| | strand | | | |
| MAPT- | 25 mer | 2381 (Hs) | CUUGACUUCAAGGACAGAGACCAGT | 202 |
| 2381 | sense | | | |
| | strand | | | |
| MAPT- | 25 mer | 2382 (Hs) | UUGACUUCAAGGACAGAGUACAGTC | 203 |
| 2382 | sense | | | |
| | strand | | | |
| MAPT- | 25 mer | 2390 (Hs) | AAGGACAGAGUCCAGUCGAAGAUTG | 204 |
| 2390 | sense | | | |
| | strand | | | |
| MAPT- | 25 mer | 2391 (Hs) | AGGACAGAGUCCAGUCGAAAAUUGG | 205 |
| 2391 | sense | | | |
| | strand | | | |
| MAPT- | 25 mer | 2414-2491 | GGGUCCCUGGACAAUAUCAACCACG | 206 |
| 2414 | sense | (Hs-Mf) | | |
| | strand | | | |
| MAPT- | 25 mer | 2448-2525 | GAGGAAAUAAAAAGAUUGAAACCCA | 207 |
| 2448 | sense | (Hs-Mf) | | |
| | strand | | | |
| MAPT- | 25 mer | 2449-2526 | AGGAAAUAAAAAGAUUGAAACCCAC | 208 |
| 2449 | sense | (Hs-Mf) | | |
| | strand | | | |
| MAPT- | 25 mer | 2450-2527 | GGAAAUAAAAAGAUUGAAAACCACA | 209 |
| 2450 | sense | (Hs-Mf) | | |
| | strand | | | |
| MAPT- | 25 mer | 2451-2528 | GAAAUAAAAAGAUUGAAACACACAA | 210 |
| 2451 | sense | (Hs-Mf) | | |
| | strand | | | |
| MAPT- | 25 mer | 2452-2529 | AAAUAAAAAGAUUGAAACCAACAAG | 211 |
| 2452 | sense | (Hs-Mf) | | |
| | strand | | | |
| MAPT- | 25 mer | 2453-2530 | AAUAAAAAGAUUGAAACCCACAAGC | 212 |
| 2453 | sense | (Hs-Mf) | | |
| | strand | | | |
| MAPT- | 25 mer | 2454-2531 | AUAAAAAGAUUGAAACCCAAAAGCT | 213 |
| 2454 | sense | (Hs-Mf) | | |
| | strand | | | |
| MAPT- | 25 mer | 2456-2533 | AAAAAGAUUGAAACCCACAAGCUGA | 214 |
| 2456 | sense | (Hs-Mf) | | |
| | strand | | | |
| MAPT- | 25 mer | 2457-2534 | AAAAGAUUGAAACCCACAAACUGAC | 215 |
| 2457 | sense | (Hs-Mf) | | |
| | strand | | | |
| MAPT- | 25 mer | 2567 (Hs) | CGGCAUCUCAGCAAUGUCUACUCCA | 216 |
| 2567 | sense | | | |
| | strand | | | |
| MAPT- | 25 mer | 2598-2675 | GCAUCGACAUGGUAGACUCACCCCA | 217 |
| 2598 | sense | (Hs-Mf) | | |
| | strand | | | |
| MAPT- | 25 mer | 2657-2734 | CUGGCCAAGCAGGGUUUGUAAUCAG | 218 |
| 2657 | sense | (Hs-Mf) | | |
| | strand | | | |
| MAPT- | 25 mer | 2723-2800 | AGAGUGUGGAAAAAAAAAGAAUAAT | 219 |
| 2723 | sense | (Hs-Mf) | | |
| | strand | | | |
| MAPT- | 25 mer | 2724-2801 | GAGUGUGGAAAAAAAAAGAAUAATG | 220 |
| 2724 | sense | (Hs-Mf) | | |
| | strand | | | |
| MAPT- | 25 mer | 2726-2803 | GUGUGGAAAAAAAAAGAAUAAUGAC | 221 |
| 2726 | sense | (Hs-Mf) | | |
| | strand | | | |
| MAPT- | 25 mer | 2784-2860- | GCAGUUCGGUUAAUUGGUUAAUCAC | 222 |
| 2784 | sense | 1 mismatch | | |
| | strand | (Hs-Mf) | | |
| MAPT- | 25 mer | 2963-3039 | GGCAAUUCCUUUUGAUUCUAUUUTC | 223 |
| 2963 | sense | (Hs-Mf) | | |
| | strand | | | |
| MAPT- | 25 mer | 3110-3186 | AGCAACAAAGGAUUUGAAAAUUGGT | 224 |
| 3110 | sense | (Hs-Mf) | | |
| | strand | | | |
| MAPT- | 25 mer | 3114-3190 | ACAAAGGAUUUGAAACUUGAUGUGT | 225 |
| 3114 | sense | (Hs-Mf) | | |
| | strand | | | |
| MAPT- | 25 mer | 3116-3192 | AAAGGAUUUGAAACUUGGUAUGUTC | 226 |
| 3116 | sense | (Hs-Mf) | | |
| | strand | | | |
| MAPT- | 25 mer | 3118-3194 | AGGAUUUGAAACUUGGUGUAUUCGT | 227 |
| 3118 | sense | (Hs-Mf) | | |
| | strand | | | |
| MAPT- | 25 mer | 3158-3234 | CGAUGUCAACCUUGUGUGAAUGUGA | 228 |
| 3158 | sense | (Hs-Mf) | | |
| | strand | | | |
| MAPT- | 25 mer | 3503-3576 | AAAGACUGACCUUGAUGUCAUGAGA | 229 |
| 3503 | sense | (Hs-Mf) | | |
| | strand | | | |
| MAPT- | 25 mer | 3589-3661 | CUCCACAGAAACCCUGUUUAAUUGA | 230 |
| 3589 | sense | (Hs-Mf) | | |
| | strand | | | |
| MAPT- | 25 mer | 3591-3663 | CCACAGAAACCCUGUUUUAAUGAGT | 231 |
| 3591 | sense | (Hs-Mf) | | |
| | strand | | | |
| MAPT- | 25 mer | 3592-3664 | CACAGAAACCCUGUUUUAUAGAGTT | 232 |
| 3592 | sense | (Hs-Mf) | | |
| | strand | | | |
| MAPT- | 25 mer | 3593-3665 | ACAGAAACCCUGUUUUAUUAAGUTC | 233 |
| 3593 | sense | (Hs-Mf) | | |
| | strand | | | |
| MAPT- | 25 mer | 3594-3666 | CAGAAACCCUGUUUUAUUGAGUUCT | 234 |
| 3594 | sense | (Hs-Mf) | | |
| | strand | | | |
| MAPT- | 25 mer | 3595-3667 | AGAAACCCUGUUUUAUUGAAUUCTG | 235 |
| 3595 | sense | (Hs-Mf) | | |
| | strand | | | |
| MAPT- | 25 mer | 3596-3668 | GAAACCCUGUUUUAUUGAGAUCUGA | 236 |
| 3596 | sense | (Hs-Mf) | | |
| | strand | | | |
| MAPT- | 25 mer | 3597-3669 | AAACCCUGUUUUAUUGAGUACUGAA | 237 |
| 3597 | sense | (Hs-Mf) | | |
| | strand | | | |
| MAPT- | 25 mer | 3598-3670 | AACCCUGUUUUAUUGAGUUAUGAAG | 238 |
| 3598 | sense | (Hs-Mf) | | |
| | strand | | | |
| MAPT- | 25 mer | 3599-3671 | ACCCUGUUUUAUUGAGUUCAGAAGG | 239 |
| 3599 | sense | (Hs-Mf) | | |
| | strand | | | |
| MAPT- | 25 mer | 3600-3672 | CCCUGUUUUAUUGAGUUCUAAAGGT | 240 |
| 3600 | sense | (Hs-Mf) | | |
| | strand | | | |
| MAPT- | 25 mer | 3601-3673 | CCUGUUUUAUUGAGUUCUGAAGGTT | 241 |
| 3601 | sense | (Hs-Mf) | | |
| | strand | | | |
| MAPT- | 25 mer | 3602-3674 | CUGUUUUAUUGAGUUCUGAAGGUTG | 242 |
| 3602 | sense | (Hs-Mf) | | |
| | strand | | | |
| MAPT- | 25 mer | 3603-3675 | UGUUUUAUUGAGUUCUGAAAGUUGG | 243 |
| 3603 | sense | (Hs-Mf) | | |
| | strand | | | |
| MAPT- | 25 mer | 3605-3677 | UUUUAUUGAGUUCUGAAGGAUGGAA | 244 |
| 3605 | sense | (Hs-Mf) | | |
| | strand | | | |
| MAPT- | 25 mer | 3607-3679 | UUAUUGAGUUCUGAAGGUUAGAACT | 245 |
| 3607 | sense | (Hs-Mf) | | |
| | strand | | | |
| MAPT- | 25 mer | 3609-3681 | AUUGAGUUCUGAAGGUUGGAACUGC | 246 |
| 3609 | sense | (Hs-Mf) | | |
| | strand | | | |
| MAPT- | 25 mer | 3610-3682 | UUGAGUUCUGAAGGUUGGAACUGCT | 247 |
| 3610 | sense | (Hs-Mf) | | |
| | strand | | | |
| MAPT- | 25 mer | 3677-3749 | AACCAGUUCUCUUUGUAAGAACUTG | 248 |
| 3677 | sense | (Hs-Mf) | | |
| | strand | | | |
| MAPT- | 25 mer | 3678-3750 | ACCAGUUCUCUUUGUAAGGACUUGT | 249 |
| 3678 | sense | (Hs-Mf) | | |
| | strand | | | |
| MAPT- | 25 mer | 3679-3751 | CCAGUUCUCUUUGUAAGGAAUUGTG | 250 |
| 3679 | sense | (Hs-Mf) | | |
| | strand | | | |
| MAPT- | 25 mer | 3680-3752 | CAGUUCUCUUUGUAAGGACAUGUGC | 251 |
| 3680 | sense | (Hs-Mf) | | |
| | strand | | | |
| MAPT- | 25 mer | 3958-4030 | CUACUCCAUACUGAGGGUGAAAUTA | 252 |
| 3958 | sense | (Hs-Mf) | | |
| | strand | | | |
| MAPT- | 25 mer | 3959-4031 | UACUCCAUACUGAGGGUGAAAUUAA | 253 |
| 3959 | sense | (Hs-Mf) | | |
| | strand | | | |
| MAPT- | 25 mer | 3960-4032 | ACUCCAUACUGAGGGUGAAAUUAAG | 254 |
| 3960 | sense | (Hs-Mf) | | |
| | strand | | | |
| MAPT- | 25 mer | 3961-4033 | CUCCAUACUGAGGGUGAAAAUAAGG | 255 |
| 3961 | sense | (Hs-Mf) | | |
| | strand | | | |
| MAPT- | 25 mer | 3965-4037 | AUACUGAGGGUGAAAUUAAAGGAAG | 256 |
| 3965 | sense | (Hs-Mf) | | |
| | strand | | | |
| MAPT- | 25 mer | 3970-4042 | GAGGGUGAAAUUAAGGGAAAGCAAA | 257 |
| 3970 | sense | (Hs-Mf) | | |
| | strand | | | |
| MAPT- | 25 mer | 4146-4218 | GGUGUUUCUGCCUUGUUGAAAUGGA | 258 |
| 4146 | sense | (Hs-Mf) | | |
| | strand | | | |
| MAPT- | 25 mer | 4474-4545 | CUGGAGCAGCUGAACAUAUACAUAG | 259 |
| 4474 | sense | (Hs-Mf) | | |
| | strand | | | |
| MAPT- | 25 mer | 4475-4546 | UGGAGCAGCUGAACAUAUAAAUAGA | 260 |
| 4475 | sense | (Hs-Mf) | | |
| | strand | | | |
| MAPT- | 25 mer | 4477-4548 | GAGCAGCUGAACAUAUACAAAGATG | 261 |
| 4477 | sense | (Hs-Mf) | | |
| | strand | | | |
| MAPT- | 25 mer | 4478-4549 | AGCAGCUGAACAUAUACAUAGAUGT | 262 |
| 4478 | sense | (Hs-Mf) | | |
| | strand | | | |
| MAPT- | 25 mer | 4479-4550 | GCAGCUGAACAUAUACAUAAAUGTT | 263 |
| 4479 | sense | (Hs-Mf) | | |
| | strand | | | |
| MAPT- | 25 mer | 4480-4551 | CAGCUGAACAUAUACAUAGAUGUTG | 264 |
| 4480 | sense | (Hs-Mf) | | |
| | strand | | | |
| MAPT- | 25 mer | 4481-4552 | AGCUGAACAUAUACAUAGAAGUUGC | 265 |
| 4481 | sense | (Hs-Mf) | | |
| | strand | | | |
| MAPT- | 25 mer | 4482-4553 | GCUGAACAUAUACAUAGAUAUUGCC | 266 |
| 4482 | sense | (Hs-Mf) | | |
| | strand | | | |
| MAPT- | 25 mer | 4485-4556 | GAACAUAUACAUAGAUGUUACCCTG | 267 |
| 4485 | sense | (Hs-Mf) | | |
| | strand | | | |
| MAPT- | 25 mer | 4486-4557 | AACAUAUACAUAGAUGUUGACCUGC | 268 |
| 4486 | sense | (Hs-Mf) | | |
| | strand | | | |
| MAPT- | 25 mer | 4532 (Hs) | GAGUUGUAGUUGGAUUUGUAUGUTT | 269 |
| 4532 | sense | | | |
| | strand | | | |
| MAPT- | 25 mer | 4533 (Hs) | AGUUGUAGUUGGAUUUGUCAGUUTA | 270 |
| 4533 | sense | | | |
| | strand | | | |
| MAPT- | 25 mer | 4539-4610 | AGUUGGAUUUGUCUGUUUAAGCUTG | 271 |
| 4539 | sense | (Hs-Mf) | | |
| | strand | | | |
| MAPT- | 25 mer | 4540-4611 | GUUGGAUUUGUCUGUUUAUACUUGG | 272 |
| 4540 | sense | (Hs-Mf) | | |
| | strand | | | |
| MAPT- | 25 mer | 4541-4612 | UUGGAUUUGUCUGUUUAUGAUUGGA | 273 |
| 4541 | sense | (Hs-Mf) | | |
| | strand | | | |
| MAPT- | 25 mer | 4543-4614 | GGAUUUGUCUGUUUAUGCUAGGATT | 274 |
| 4543 | sense | (Hs-Mf) | | |
| | strand | | | |
| MAPT- | 25 mer | 4544-4615 | GAUUUGUCUGUUUAUGCUUAGAUTC | 275 |
| 4544 | sense | (Hs-Mf) | | |
| | strand | | | |
| MAPT- | 25 mer | 4545-4616 | AUUUGUCUGUUUAUGCUUGAAUUCA | 276 |
| 4545 | sense | (Hs-Mf) | | |
| | strand | | | |
| MAPT- | 25 mer | 4546-4617 | UUUGUCUGUUUAUGCUUGGAUUCAC | 277 |
| 4546 | sense | (Hs-Mf) | | |
| | strand | | | |
| MAPT- | 25 mer | 4547-4618 | UUGUCUGUUUAUGCUUGGAAUCACC | 278 |
| 4547 | sense | (Hs-Mf) | | |
| | strand | | | |
| MAPT- | 25 mer | 4548-4619 | UGUCUGUUUAUGCUUGGAUACACCA | 279 |
| 4548 | sense | (Hs-Mf) | | |
| | strand | | | |
| MAPT- | 25 mer | 4549-4620 | GUCUGUUUAUGCUUGGAUUAACCAG | 280 |
| 4549 | sense | (Hs-Mf) | | |
| | strand | | | |
| MAPT- | 25 mer | 4550-4621 | UCUGUUUAUGCUUGGAUUCACCAGA | 281 |
| 4550 | sense | (Hs-Mf) | | |
| | strand | | | |
| MAPT- | 25 mer | 4551-4622 | CUGUUUAUGCUUGGAUUCAACAGAG | 282 |
| 4551 | sense | (Hs-Mf) | | |
| | strand | | | |
| MAPT- | 25 mer | 4552-4623 | UGUUUAUGCUUGGAUUCACAAGAGT | 283 |
| 4552 | sense | (Hs-Mf) | | |
| | strand | | | |
| MAPT- | 25 mer | 4554-4625 | UUUAUGCUUGGAUUCACCAAAGUGA | 284 |
| 4554 | sense | (Hs-Mf) | | |
| | strand | | | |
| MAPT- | 25 mer | 4556-4627 | UAUGCUUGGAUUCACCAGAAUGACT | 285 |
| 4556 | sense | (Hs-Mf) | | |
| | strand | | | |
| MAPT- | 25 mer | 4557-4628 | AUGCUUGGAUUCACCAGAGAGACTA | 286 |
| 4557 | sense | (Hs-Mf) | | |
| | strand | | | |
| MAPT- | 25 mer | 4558-4629 | UGCUUGGAUUCACCAGAGUAACUAT | 287 |
| 4558 | sense | (Hs-Mf) | | |
| | strand | | | |
| MAPT- | 25 mer | 4559-4630 | GCUUGGAUUCACCAGAGUGACUATG | 288 |
| 4559 | sense | (Hs-Mf) | | |
| | strand | | | |
| MAPT- | 25 mer | 4560-4631 | CUUGGAUUCACCAGAGUGAAUAUGA | 289 |
| 4560 | sense | (Hs-Mf) | | |
| | strand | | | |
| MAPT- | 25 mer | 4561-4632 | UUGGAUUCACCAGAGUGACAAUGAT | 290 |
| 4561 | sense | (Hs-Mf) | | |
| | strand | | | |
| MAPT- | 25 mer | 4562-4633 | UGGAUUCACCAGAGUGACUAUGATA | 291 |
| 4562 | sense | (Hs-Mf) | | |
| | strand | | | |
| MAPT- | 25 mer | 4563-4634 | GGAUUCACCAGAGUGACUAAGAUAG | 292 |
| 4563 | sense | (Hs-Mf) | | |
| | strand | | | |
| MAPT- | 25 mer | 4564-4635 | GAUUCACCAGAGUGACUAUAAUAGT | 293 |
| 4564 | sense | (Hs-Mf) | | |
| | strand | | | |
| MAPT- | 25 mer | 4615-4687 | ACGCAUGUAUCUUGAAAUGAUUGTA | 294 |
| 4615 | sense | (Hs-Mf) | | |
| | strand | | | |
| MAPT- | 25 mer | 4616-4688 | CGCAUGUAUCUUGAAAUGCAUGUAA | 295 |
| 4616 | sense | (Hs-Mf) | | |
| | strand | | | |
| MAPT- | 25 mer | 4617-4689 | GCAUGUAUCUUGAAAUGCUAGUAAA | 296 |
| 4617 | sense | (Hs-Mf) | | |
| | strand | | | |
| MAPT- | 25 mer | 4618-4690 | CAUGUAUCUUGAAAUGCUUAUAAAG | 297 |
| 4618 | sense | (Hs-Mf) | | |
| | strand | | | |
| MAPT- | 25 mer | 4619-4691 | AUGUAUCUUGAAAUGCUUGAAAAGA | 298 |
| 4619 | sense | (Hs-Mf) | | |
| | strand | | | |
| MAPT- | 25 mer | 4620-4692 | UGUAUCUUGAAAUGCUUGUAAAGAG | 299 |
| 4620 | sense | (Hs-Mf) | | |
| | strand | | | |
| MAPT- | 25 mer | 4621-4693 | GUAUCUUGAAAUGCUUGUAAAGAGG | 300 |
| 4621 | sense | (Hs-Mf) | | |
| | strand | | | |
| MAPT- | 25 mer | 4622-4694 | UAUCUUGAAAUGCUUGUAAAGAGGT | 301 |
| 4622 | sense | (Hs-Mf) | | |
| | strand | | | |
| MAPT- | 25 mer | 4623-4695 | AUCUUGAAAUGCUUGUAAAAAGGTT | 302 |
| 4623 | sense | (Hs-Mf) | | |
| | strand | | | |
| MAPT- | 25 mer | 4625-4697 | CUUGAAAUGCUUGUAAAGAAGUUTC | 303 |
| 4625 | sense | (Hs-Mf) | | |
| | strand | | | |
| MAPT- | 25 mer | 4627-4699 | UGAAAUGCUUGUAAAGAGGAUUCTA | 304 |
| 4627 | sense | (Hs-Mf) | | |
| | strand | | | |
| MAPT- | 25 mer | 4628-4700 | GAAAUGCUUGUAAAGAGGUAUCUAA | 305 |
| 4628 | sense | (Hs-Mf) | | |
| | strand | | | |
| MAPT- | 25 mer | 4629-4701 | AAAUGCUUGUAAAGAGGUUACUAAC | 306 |
| 4629 | sense | (Hs-Mf) | | |
| | strand | | | |
| MAPT- | 25 mer | 4630-4702 | AAUGCUUGUAAAGAGGUUUAUAACC | 307 |
| 4630 | sense | (Hs-Mf) | | |
| | strand | | | |
| MAPT- | 25 mer | 4632-4704 | UGCUUGUAAAGAGGUUUCUAACCCA | 308 |
| 4632 | sense | (Hs-Mf) | | |
| | strand | | | |
| MAPT- | 25 mer | 4633-4705 | GCUUGUAAAGAGGUUUCUAACCCAC | 309 |
| 4633 | sense | (Hs-Mf) | | |
| | strand | | | |
| MAPT- | 25 mer | 4825-4897 | ACAGGAUUAGGACUGAAGCAAUGAT | 310 |
| 4825 | sense | (Hs-Mf) | | |
| | strand | | | |
| MAPT- | 25 mer | 4828-4900 | GGAUUAGGACUGAAGCGAUAAUGTC | 311 |
| 4828 | sense | (Hs-Mf) | | |
| | strand | | | |
| MAPT- | 25 mer | 5682-5743 | GAAGUUCUUGUGCCCUGCUAUUCAG | 312 |
| 5682 | sense | (Hs-Mf) | | |
| | strand | | | |
| MAPT- | 25 mer | 5958 (Hs) | AAGCUGCUGACUCACUUUAACAATA | 313 |
| 5958 | sense | | | |
| | strand | | | |
| MAPT- | 25 mer | 5959 (Hs) | AGCUGCUGACUCACUUUAUAAAUAG | 314 |
| 5959 | sense | | | |
| | strand | | | |
| MAPT- | 25 mer | 5961 (Hs) | CUGCUGACUCACUUUAUCAAUAGTT | 315 |
| 5961 | sense | | | |
| | strand | | | |
| MAPT- | 25 mer | 5963 (Hs) | GCUGACUCACUUUAUCAAUAGUUCC | 316 |
| 5963 | sense | | | |
| | strand | | | |
| MAPT- | 25 mer | 5964 (Hs) | CUGACUCACUUUAUCAAUAAUUCCA | 317 |
| 5964 | sense | | | |
| | strand | | | |
| MAPT- | 25 mer | 5965 (Hs) | UGACUCACUUUAUCAAUAGUUCCAU | 318 |
| 5965 | sense | | | |
| | strand | | | |
| MAPT- | 25 mer | 5966-6021 | GACUCACUUUAUCAAUAGUACCATT | 319 |
| 5966 | sense | (Hs-Mf) | | |
| | strand | | | |
| MAPT- | 25 mer | 5967-6022 | ACUCACUUUAUCAAUAGUUACAUTT | 320 |
| 5967 | sense | (Hs-Mf) | | |
| | strand | | | |
| MAPT- | 25 mer | 5968-6023 | CUCACUUUAUCAAUAGUUCAAUUTA | 321 |
| 5968 | sense | (Hs-Mf) | | |
| | strand | | | |
| MAPT- | 25 mer | 6006-6061 | GGUGAGACUGUAUCCUGUUAGCUAT | 322 |
| 6006 | sense | (Hs-Mf) | | |
| | strand | | | |
| MAPT- | 25 mer | 6007-6062 | GUGAGACUGUAUCCUGUUUACUATT | 323 |
| 6007 | sense | (Hs-Mf) | | |
| | strand | | | |
| MAPT- | 25 mer | 6008-6063 | UGAGACUGUAUCCUGUUUGAUAUTG | 324 |
| 6008 | sense | (Hs-Mf) | | |
| | strand | | | |
| MAPT- | 25 mer | 6009-6064 | GAGACUGUAUCCUGUUUGCAAUUGC | 325 |
| 6009 | sense | (Hs-Mf) | | |
| | strand | | | |
| MAPT- | 25 mer | 6010-6065 | AGACUGUAUCCUGUUUGCUAUUGCT | 326 |
| 6010 | sense | (Hs-Mf) | | |
| | strand | | | |
| MAPT- | 25 mer | 6011-6066 | GACUGUAUCCUGUUUGCUAAUGCTT | 327 |
| 6011 | sense | (Hs-Mf) | | |
| | strand | | | |
| MAPT- | 25 mer | 6012-6067 | ACUGUAUCCUGUUUGCUAUAGCUTG | 328 |
| 6012 | sense | (Hs-Mf) | | |
| | strand | | | |
| MAPT- | 25 mer | 6013-6068 | CUGUAUCCUGUUUGCUAUUACUUGT | 329 |
| 6013 | sense | (Hs-Mf) | | |
| | strand | | | |
| MAPT- | 25 mer | 6014-6069 | UGUAUCCUGUUUGCUAUUGAUUGTT | 330 |
| 6014 | sense | (Hs-Mf) | | |
| | strand | | | |
| MAPT- | 25 mer | 6015-6070 | GUAUCCUGUUUGCUAUUGCAUGUTG | 331 |
| 6015 | sense | (Hs-Mf) | | |
| | strand | | | |
| MAPT- | 25 mer | 6017-6072 | AUCCUGUUUGCUAUUGCUUAUUGTG | 332 |
| 6017 | sense | (Hs-Mf) | | |
| | strand | | | |
| MAPT- | 25 mer | 6119-6174 | GCCUCGUAACCCUUUUCAUAAUUTC | 333 |
| 6119 | sense | (Hs-Mf) | | |
| | strand | | | |
| MAPT- | 25 mer | 6628-6689 | GAGUUUGCCAUGUUGAGCAAGACTA | 334 |
| 6628 | sense | (Hs-Mf) | | |
| | strand | | | |
| MAPT- | 25 mer | 6629-6690 | AGUUUGCCAUGUUGAGCAGAACUAT | 335 |
| 6629 | sense | (Hs-Mf) | | |
| | strand | | | |
| MAPT- | 25 mer | 6631-6692 | UUUGCCAUGUUGAGCAGGAAUAUTT | 336 |
| 6631 | sense | (Hs-Mf) | | |
| | strand | | | |
| MAPT- | 25 mer | 6672-6733 | CCAUGAUUUCUUCGGUAAUACUGAG | 337 |
| 6672 | sense | (Hs-Mf) | | |
| | strand | | | |
| MAPT- | 25 mer | 6731 (Hs) | GCUUUCUGUCUGUGAAUGUAUAUAT | 338 |
| 6731 | sense | | | |
| | strand | | | |
| MAPT- | 25 mer | 6732 (Hs) | CUUUCUGUCUGUGAAUGUCAAUATA | 339 |
| 6732 | sense | | | |
| | strand | | | |
| MAPT- | 25 mer | 6738-6799 | GUCUGUGAAUGUCUAUAUAAUGUAT | 340 |
| 6738 | sense | (Hs-Mf) | | |
| | strand | | | |
| MAPT- | 25 mer | 6739-6800 | UCUGUGAAUGUCUAUAUAGAGUATT | 341 |
| 6739 | sense | (Hs-Mf) | | |
| | strand | | | |
| MAPT- | 25 mer | 6740-6801 | CUGUGAAUGUCUAUAUAGUAUAUTG | 342 |
| 6740 | sense | (Hs-Mf) | | |
| | strand | | | |
| MAPT- | 25 mer | 6741-6802 | UGUGAAUGUCUAUAUAGUGAAUUGT | 343 |
| 6741 | sense | (Hs-Mf) | | |
| | strand | | | |
| MAPT- | 25 mer | 6742-6803 | GUGAAUGUCUAUAUAGUGUAUUGTG | 344 |
| 6742 | sense | (Hs-Mf) | | |
| | strand | | | |
| MAPT- | 25 mer | 6743-6804 | UGAAUGUCUAUAUAGUGUAAUGUGT | 345 |
| 6743 | sense | (Hs-Mf) | | |
| | strand | | | |
| MAPT- | 25 mer | 6745-6806 | AAUGUCUAUAUAGUGUAUUAUGUGT | 346 |
| 6745 | sense | (Hs-Mf) | | |
| | strand | | | |
| MAPT- | 25 mer | 6748-6809 | GUCUAUAUAGUGUAUUGUGAGUUTT | 347 |
| 6748 | sense | (Hs-Mf) | | |
| | strand | | | |
| MAPT- | 25 mer | 6749-6810 | UCUAUAUAGUGUAUUGUGUAUUUTA | 348 |
| 6749 | sense | (Hs-Mf) | | |
| | strand | | | |
| MAPT- | 25 mer | 6750-6811 | CUAUAUAGUGUAUUGUGUGAUUUAA | 349 |
| 6750 | sense | (Hs-Mf) | | |
| | strand | | | |
| MAPT- | 25 mer | 6751-6812 | UAUAUAGUGUAUUGUGUGUAUUAAC | 350 |
| 6751 | sense | (Hs-Mf) | | |
| | strand | | | |
| MAPT- | 25 mer | 6752-6813 | AUAUAGUGUAUUGUGUGUUAUAACA | 351 |
| 6752 | sense | (Hs-Mf) | | |
| | strand | | | |
| MAPT- | 25 mer | 6753-6814 | UAUAGUGUAUUGUGUGUUUAAACAA | 352 |
| 6753 | sense | (Hs-Mf) | | |
| | strand | | | |
| MAPT- | 25 mer | 6754-6815 | AUAGUGUAUUGUGUGUUUUAACAAA | 353 |
| 6754 | sense | (Hs-Mf) | | |
| | strand | | | |
| MAPT- | 25 mer | 6755-6816 | UAGUGUAUUGUGUGUUUUAACAAAT | 354 |
| 6755 | sense | (Hs-Mf) | | |
| | strand | | | |
| MAPT- | 25 mer | 6756-6817 | AGUGUAUUGUGUGUUUUAAAAAATG | 355 |
| 6756 | sense | (Hs-Mf) | | |
| | strand | | | |
| MAPT- | 25 mer | 6757-6818 | GUGUAUUGUGUGUUUUAACAAAUGA | 356 |
| 6757 | sense | (Hs-Mf) | | |
| | strand | | | |
| MAPT- | 25 mer | 6758-6819 | UGUAUUGUGUGUUUUAACAAAUGAT | 357 |
| 6758 | sense | (Hs-Mf) | | |
| | strand | | | |
| MAPT- | 25 mer | 6759-6820 | GUAUUGUGUGUUUUAACAAAUGATT | 358 |
| 6759 | sense | (Hs-Mf) | | |
| | strand | | | |
| MAPT- | 25 mer | 6760-6821 | UAUUGUGUGUUUUAACAAAAGAUTT | 359 |
| 6760 | sense | (Hs-Mf) | | |
| | strand | | | |
| MAPT- | 25 mer | 6761-6822 | AUUGUGUGUUUUAACAAAUAAUUTA | 360 |
| 6761 | sense | (Hs-Mf) | | |
| | strand | | | |
| MAPT- | 25 mer | 6762-6823 | UUGUGUGUUUUAACAAAUGAUUUAC | 361 |
| 6762 | sense | (Hs-Mf) | | |
| | strand | | | |
| MAPT- | 25 mer | 6763-6824 | UGUGUGUUUUAACAAAUGAAUUACA | 362 |
| 6763 | sense | (Hs-Mf) | | |
| | strand | | | |
| MAPT- | 25 mer | 6764-6825 | GUGUGUUUUAACAAAUGAUAUACAC | 363 |
| 6764 | sense | (Hs-Mf) | | |
| | strand | | | |
| MAPT- | 25 mer | 6765-6826 | UGUGUUUUAACAAAUGAUUAACACT | 364 |
| 6765 | sense | (Hs-Mf) | | |
| | strand | | | |
| MAPT- | 25 mer | 6766-6827 | GUGUUUUAACAAAUGAUUUACACTG | 365 |
| 6766 | sense | (Hs-Mf) | | |
| | strand | | | |
| MAPT- | 25 mer | 6767-6828 | UGUUUUAACAAAUGAUUUAAACUGA | 366 |
| 6767 | sense | (Hs-Mf) | | |
| | strand | | | |
| MAPT- | 25 mer | 6768-6829 | GUUUUAACAAAUGAUUUACACUGAC | 367 |
| 6768 | sense | (Hs-Mf) | | |
| | strand | | | |
| MAPT- | 25 mer | 6769-6830 | UUUUAACAAAUGAUUUACAAUGACT | 368 |
| 6769 | sense | (Hs-Mf) | | |
| | strand | | | |
| MAPT- | 25 mer | 6772-6833 | UAACAAAUGAUUUACACUGACUGTT | 369 |
| 6772 | sense | (Hs-Mf) | | |
| | strand | | | |
| MAPT- | 25 mer | 6773-6834 | AACAAAUGAUUUACACUGAAUGUTG | 370 |
| 6773 | sense | (Hs-Mf) | | |
| | strand | | | |
| MAPT- | 25 mer | 6774-6835 | ACAAAUGAUUUACACUGACAGUUGC | 371 |
| 6774 | sense | (Hs-Mf) | | |
| | strand | | | |
| MAPT- | 25 mer | 6775-6836 | CAAAUGAUUUACACUGACUAUUGCT | 372 |
| 6775 | sense | (Hs-Mf) | | |
| | strand | | | |
| MAPT- | 25 mer | 6777-6838 | AAUGAUUUACACUGACUGUAGCUGT | 373 |
| 6777 | sense | (Hs-Mf) | | |
| | strand | | | |
| MAPT- | 25 mer | 6778-6839 | AUGAUUUACACUGACUGUUACUGTA | 374 |
| 6778 | sense | (Hs-Mf) | | |
| | strand | | | |
| MAPT- | 25 mer | 6779-6840 | UGAUUUACACUGACUGUUGAUGUAA | 375 |
| 6779 | sense | (Hs-Mf) | | |
| | strand | | | |
| MAPT- | 25 mer | 6780-6841 | GAUUUACACUGACUGUUGCAGUAAA | 376 |
| 6780 | sense | (Hs-Mf) | | |
| | strand | | | |
| MAPT- | 25 mer | 6781 (Hs) | AUUUACACUGACUGUUGCUAUAAAA | 377 |
| 6781 | sense | | | |
| | strand | | | |
| MAPT- | 25 mer | 6789 (Hs) | UGACUGUUGCUGUAAAAGUAAAUTT | 378 |
| 6789 | sense | | | |
| | strand | | | |
| MAPT- | 25 mer | 6792 (Hs) | CUGUUGCUGUAAAAGUGAAAUUGGA | 379 |
| 6792 | sense | | | |
| | strand | | | |
| MAPT- | 25 mer | 6793 (Hs) | UGUUGCUGUAAAAGUGAAUAUGGAA | 380 |
| 6793 | sense | | | |
| | strand | | | |
| MAPT- | 25 mer | 6795 (Hs) | UUGCUGUAAAAGUGAAUUUAGAAAT | 381 |
| 6795 | sense | | | |
| | strand | | | |
| MAPT- | 25 mer | 6796 (Hs) | UGCUGUAAAAGUGAAUUUGAAAATA | 382 |
| 6796 | sense | | | |
| | strand | | | |
| MAPT- | 25 mer | 6797 (Hs) | GCUGUAAAAGUGAAUUUGGAAAUAA | 383 |
| 6797 | sense | | | |
| | strand | | | |
| MAPT- | 25 mer | 6798 (Hs) | CUGUAAAAGUGAAUUUGGAAAUAAA | 384 |
| 6798 | sense | | | |
| | strand | | | |
| MAPT- | 27 mer | 2141-2218- | CUCCCUGCUGGUGCUUCAGGUUCUCAG | 385 |
| 2141 | antisense | 966 (Hs- | | |
| | strand | Mf-Mm) | | |
| MAPT- | 27 mer | 2142-2219- | CCUCCUGGCUGGUGCUUCAGGUUCUCA | 386 |
| 2142 | antisense | 967 (Hs- | | |
| | strand | Mf-Mm) | | |
| MAPT- | 27 mer | 2303-2380- | CUAAUUAGCCACACUUGGAGGUCACCU | 387 |
| 2303 | antisense | 1128 (Hs- | | |
| | strand | Mf-Mm) | | |
| MAPT- | 27 mer | 2347-2424- | UUUUAUUUCCACCUGGCCACCUCCUGG | 388 |
| 2347 | antisense | 1172 (Hs- | | |
| | strand | Mf-Mm) | | |
| MAPT- | 27 mer | 2349-2426- | GAUUUUACUUCCACCUGGCCACCUCCU | 389 |
| 2349 | antisense | 1174 (Hs- | | |
| | strand | Mf-Mm) | | |
| MAPT- | 27 mer | 2350-2427- | AGAUUUUACUUCCACCUGGCCACCUCC | 390 |
| 2350 | antisense | 1175 (Hs- | | |
| | strand | Mf-Mm) | | |
| MAPT- | 27 mer | 2351-2428- | CAGAUUUUACUUCCACCUGGCCACCUC | 391 |
| 2351 | antisense | 1176 (Hs- | | |
| | strand | Mf-Mm) | | |
| MAPT- | 27 mer | 2352-2429- | UCAGAUUUUACUUCCACCUGGCCACCU | 392 |
| 2352 | antisense | 1177 (Hs- | | |
| | strand | Mf-Mm) | | |
| MAPT- | 27 mer | 2353-2430- | CUCAGUUUUUACUUCCACCUGGCCACC | 393 |
| 2353 | antisense | 1178 (Hs- | | |
| | strand | Mf-Mm) | | |
| MAPT- | 27 mer | 2354-2431- | UCUCAUAUUUUACUUCCACCUGGCCAC | 394 |
| 2354 | antisense | 1179 (Hs- | | |
| | strand | Mf-Mm) | | |
| MAPT- | 27 mer | 2355-2432- | UUCUCUGAUUUUACUUCCACCUGGCCA | 395 |
| 2355 | antisense | 1180 (Hs- | | |
| | strand | Mf-Mm) | | |
| MAPT- | 27 mer | 2459-2536- | AGGUCUGCUUGUGGGUUUCAAUCUUUU | 396 |
| 2459 | antisense | 1284 (Hs- | | |
| | strand | Mf-Mm) | | |
| MAPT- | 27 mer | 2460-2537- | AAGGUUAGCUUGUGGGUUUCAAUCUUU | 397 |
| 2460 | antisense | 1285 (Hs- | | |
| | strand | Mf-Mm) | | |
| MAPT- | 27 mer | 2461-2538- | GAAGGUCAGCUUGUGGGUUUCAAUCUU | 398 |
| 2461 | antisense | 1286 (Hs- | | |
| | strand | Mf-Mm) | | |
| MAPT- | 27 mer | 2462-2539- | GGAAGUUCAGCUUGUGGGUUUCAAUCU | 399 |
| 2462 | antisense | 1287 (Hs- | | |
| | strand | Mf-Mm) | | |
| MAPT- | 27 mer | 2463-2540- | CGGAAUGUCAGCUUGUGGGUUUCAAUC | 400 |
| 2463 | antisense | 1288 (Hs- | | |
| | strand | Mf-Mm) | | |
| MAPT- | 27 mer | 2464-2541- | GCGGAUGGUCAGCUUGUGGGUUUCAAU | 401 |
| 2464 | antisense | 1289 (Hs- | | |
| | strand | Mf-Mm) | | |
| MAPT- | 27 mer | 2465-2542- | CGCGGUAGGUCAGCUUGUGGGUUUCAA | 402 |
| 2465 | antisense | 1290 (Hs- | | |
| | strand | Mf-Mm) | | |
| MAPT- | 27 mer | 2466-2543- | UCGCGUAAGGUCAGCUUGUGGGUUUCA | 403 |
| 2466 | antisense | 1291 (Hs- | | |
| | strand | Mf-Mm) | | |
| MAPT- | 27 mer | 2467-2544- | CUCGCUGAAGGUCAGCUUGUGGGUUUC | 404 |
| 2467 | antisense | 1292 (Hs- | | |
| | strand | Mf-Mm) | | |
| MAPT- | 27 mer | 2495-2572- | CCCCGUGGUCUGUCUUGGCUUUGGCGU | 405 |
| 2495 | antisense | 1320 (Hs- | | |
| | strand | Mf-Mm) | | |
| MAPT- | 27 mer | 2496-2573- | GCCCCUUGGUCUGUCUUGGCUUUGGCG | 406 |
| 2496 | antisense | 1321 (Hs- | | |
| | strand | Mf-Mm) | | |
| MAPT- | 27 mer | 3686-3758- | CAAGAUGCACAAGUCCUUACAAAGAGA | 407 |
| 3686 | antisense | 2505 (Hs- | | |
| | strand | Mf-Mm) | | |
| MAPT- | 27 mer | 3687-3759- | CCAAGUGGCACAAGUCCUUACAAAGAG | 408 |
| 3687 | antisense | 2506 (Hs- | | |
| | strand | Mf-Mm) | | |
| MAPT- | 27 mer | 3688-3760- | CCCAAUAGGCACAAGUCCUUACAAAGA | 409 |
| 3688 | antisense | 2507 (Hs- | | |
| | strand | Mf-Mm) | | |
| MAPT- | 27 mer | 3691-3763- | UCUCCUAAGAGGCACAAGUCCUUACAA | 410 |
| 3691 | antisense | 2510 (Hs- | | |
| | strand | Mf-Mm) | | |
| MAPT- | 27 mer | 3692-3764- | GUCUCUCAAGAGGCACAAGUCCUUACA | 411 |
| 3692 | antisense | 2511 (Hs- | | |
| | strand | Mf-Mm) | | |
| MAPT- | 27 mer | 3693-3765- | CGUCUUCCAAGAGGCACAAGUCCUUAC | 412 |
| 3693 | antisense | 2512 (Hs- | | |
| | strand | Mf-Mm) | | |
| MAPT- | 27 mer | 4534-4605- | AUAAAUAGACAAAUCCAACUACAACUC | 413 |
| 4534 | antisense | 3332 (Hs- | | |
| | strand | Mf-Mm) | | |
| MAPT- | 27 mer | 4535-4606- | CAUAAUCAGACAAAUCCAACUACAACU | 414 |
| 4535 | antisense | 3333 (Hs- | | |
| | strand | Mf-Mm) | | |
| MAPT- | 27 mer | 4536-4607- | GCAUAUACAGACAAAUCCAACUACAAC | 415 |
| 4536 | antisense | 3334 (Hs- | | |
| | strand | Mf-Mm) | | |
| MAPT- | 27 mer | 4537-4608- | AGCAUUAACAGACAAAUCCAACUACAA | 416 |
| 4537 | antisense | 3335 (Hs- | | |
| | strand | Mf-Mm) | | |
| MAPT- | 27 mer | 4538-4609- | AAGCAUAAACAGACAAAUCCAACUACA | 417 |
| 4538 | antisense | 3336 (Hs- | | |
| | strand | Mf-Mm) | | |
| MAPT- | 27 mer | 4566-4637- | UCACUUUCAUAGUCACUCUGGUGAAUC | 418 |
| 4566 | antisense | 3362 (Hs- | | |
| | strand | Mf-Mm) | | |
| MAPT- | 27 mer | 4567-4638- | UUCACUAUCAUAGUCACUCUGGUGAAU | 419 |
| 4567 | antisense | 3363 (Hs- | | |
| | strand | Mf-Mm) | | |
| MAPT- | 27 mer | 4568-4639- | UUUCAUUAUCAUAGUCACUCUGGUGAA | 420 |
| 4568 | antisense | 3364 (Hs- | | |
| | strand | Mf-Mm) | | |
| MAPT- | 27 mer | 4569-4640- | UUUUCUCUAUCAUAGUCACUCUGGUGA | 421 |
| 4569 | antisense | 3365 (Hs- | | |
| | strand | Mf-Mm) | | |
| MAPT- | 27 mer | 4570-4641- | CUUUUUACUAUCAUAGUCACUCUGGUG | 422 |
| 4570 | antisense | 3366 (Hs- | | |
| | strand | Mf-Mm) | | |
| MAPT- | 27 mer | 4571-4642- | UCUUUUCACUAUCAUAGUCACUCUGGU | 423 |
| 4571 | antisense | 3367 (Hs- | | |
| | strand | Mf-Mm) | | |
| MAPT- | 27 mer | 4572-4643- | UUCUUUUCACUAUCAUAGUCACUCUGG | 424 |
| 4572 | antisense | 3368 (Hs- | | |
| | strand | Mf-Mm) | | |
| MAPT- | 27 mer | 4573-4644- | UUUCUUUUCACUAUCAUAGUCACUCUG | 425 |
| 4573 | antisense | 3369 (Hs- | | |
| | strand | Mf-Mm) | | |
| MAPT- | 27 mer | 4574-4645- | UUUUCUUUUCACUAUCAUAGUCACUCU | 426 |
| 4574 | antisense | 3370 (Hs- | | |
| | strand | Mf-Mm) | | |
| MAPT- | 27 mer | 4575-4646- | UUUUUUUUUUCACUAUCAUAGUCACUC | 427 |
| 4575 | antisense | 3371 (Hs- | | |
| | strand | Mf-Mm) | | |
| MAPT- | 27 mer | 4576-4647- | UUUUUUCUUUUCACUAUCAUAGUCACU | 428 |
| 4576 | antisense | 3372 (Hs- | | |
| | strand | Mf-Mm) | | |
| MAPT- | 27 mer | 4577-4648- | UUUUUUUCUUUUCACUAUCAUAGUCAC | 429 |
| 4577 | antisense | 3373 (Hs- | | |
| | strand | Mf-Mm) | | |
| MAPT- | 27 mer | 4578-4649- | UUUUUUUUCUUUUCACUAUCAUAGUCA | 430 |
| 4578 | antisense | 3374 (Hs- | | |
| | strand | Mf-Mm) | | |
| MAPT- | 27 mer | 4579-4650- | UUUUUUUUUCUUUUCACUAUCAUAGUC | 431 |
| 4579 | antisense | 3375 (Hs- | | |
| | strand | Mf-Mm) | | |
| MAPT- | 27 mer | 4580-4651- | UUUUUUUUUUCUUUUCACUAUCAUAGU | 432 |
| 4580 | antisense | 3376 (Hs- | | |
| | strand | Mf-Mm) | | |
| MAPT- | 27 mer | 4605-4677- | UCAAGUUACAUGCGUCCUUUUUUUUUU | 433 |
| 4605 | antisense | 3439 (Hs- | | |
| | strand | Mf-Mm) | | |
| MAPT- | 27 mer | 4606-4678- | UUCAAUAUACAUGCGUCCUUUUUUUUU | 434 |
| 4606 | antisense | 3440 (Hs- | | |
| | strand | Mf-Mm) | | |
| MAPT- | 27 mer | 4607-4679- | UUUCAUGAUACAUGCGUCCUUUUUUUU | 435 |
| 4607 | antisense | 3441 (Hs- | | |
| | strand | Mf-Mm) | | |
| MAPT- | 27 mer | 4608-4680- | AUUUCUAGAUACAUGCGUCCUUUUUUU | 436 |
| 4608 | antisense | 3442 (Hs- | | |
| | strand | Mf-Mm) | | |
| MAPT- | 27 mer | 4609-4681- | CAUUUUAAGAUACAUGCGUCCUUUUUU | 437 |
| 4609 | antisense | 3443 (Hs- | | |
| | strand | Mf-Mm) | | |
| MAPT- | 27 mer | 4610-4682- | GCAUUUCAAGAUACAUGCGUCCUUUUU | 438 |
| 4610 | antisense | 3444 (Hs- | | |
| | strand | Mf-Mm) | | |
| MAPT- | 27 mer | 4611-4683- | AGCAUUUCAAGAUACAUGCGUCCUUUU | 439 |
| 4611 | antisense | 3445 (Hs- | | |
| | strand | Mf-Mm) | | |
| MAPT- | 27 mer | 4612-4684- | AAGCAUUUCAAGAUACAUGCGUCCUUU | 440 |
| 4612 | antisense | 3446 (Hs- | | |
| | strand | Mf-Mm) | | |
| MAPT- | 27 mer | 4613-4685- | CAAGCUUUUCAAGAUACAUGCGUCCUU | 441 |
| 4613 | antisense | 3447 (Hs- | | |
| | strand | Mf-Mm) | | |
| MAPT- | 27 mer | 4614-4686- | ACAAGUAUUUCAAGAUACAUGCGUCCU | 442 |
| 4614 | antisense | 3448 (Hs- | | |
| | strand | Mf-Mm) | | |
| MAPT- | 27 mer | 5969-6024- | UUAAAUGGAACUAUUGAUAAAGUGAGU | 443 |
| 5969 | antisense | 4540 (Hs- | | |
| | strand | Mf-Mm) | | |
| MAPT- | 27 mer | 5970-6025- | UUUAAUUGGAACUAUUGAUAAAGUGAG | 444 |
| 5970 | antisense | 4541 (Hs- | | |
| | strand | Mf-Mm) | | |
| MAPT- | 27 mer | 5971-6026- | AUUUAUAUGGAACUAUUGAUAAAGUGA | 445 |
| 5971 | antisense | 4542 (Hs- | | |
| | strand | Mf-Mm) | | |
| MAPT- | 27 mer | 5972-6027- | AAUUUUAAUGGAACUAUUGAUAAAGUG | 446 |
| 5972 | antisense | 4543 (Hs- | | |
| | strand | Mf-Mm) | | |
| MAPT- | 27 mer | 5973-6028- | CAAUUUAAAUGGAACUAUUGAUAAAGU | 447 |
| 5973 | antisense | 4544 (Hs- | | |
| | strand | Mf-Mm) | | |
| MAPT- | 27 mer | 5974-6029- | UCAAUUUAAAUGGAACUAUUGAUAAAG | 448 |
| 5974 | antisense | 4545 (Hs- | | |
| | strand | Mf-Mm) | | |
| MAPT- | 27 mer | 5975-6030- | GUCAAUUUAAAUGGAACUAUUGAUAAA | 449 |
| 5975 | antisense | 4546 (Hs- | | |
| | strand | Mf-Mm) | | |
| MAPT- | 27 mer | 5976-6031- | AGUCAUUUUAAAUGGAACUAUUGAUAA | 450 |
| 5976 | antisense | 4547 (Hs- | | |
| | strand | Mf-Mm) | | |
| MAPT- | 27 mer | 5977-6032- | AAGUCUAUUUAAAUGGAACUAUUGAUA | 451 |
| 5977 | antisense | 4548 (Hs- | | |
| | strand | Mf-Mm) | | |
| MAPT- | 27 mer | 5978-6033- | GAAGUUAAUUUAAAUGGAACUAUUGAU | 452 |
| 5978 | antisense | 4549 (Hs- | | |
| | strand | Mf-Mm) | | |
| MAPT- | 27 mer | 5979-6034- | UGAAGUCAAUUUAAAUGGAACUAUUGA | 453 |
| 5979 | antisense | 4550 (Hs- | | |
| | strand | Mf-Mm) | | |
| MAPT- | 27 mer | 5980-6035- | CUGAAUUCAAUUUAAAUGGAACUAUUG | 454 |
| 5980 | antisense | 4551 (Hs- | | |
| | strand | Mf-Mm) | | |
| MAPT- | 27 mer | 5981-6036- | ACUGAUGUCAAUUUAAAUGGAACUAUU | 455 |
| 5981 | antisense | 4552 (Hs- | | |
| | strand | Mf-Mm) | | |
| MAPT- | 27 mer | 5982-6037- | CACUGUAGUCAAUUUAAAUGGAACUAU | 456 |
| 5982 | antisense | 4553 (Hs- | | |
| | strand | Mf-Mm) | | |
| MAPT- | 27 mer | 5983-6038- | CCACUUAAGUCAAUUUAAAUGGAACUA | 457 |
| 5983 | antisense | 4554 (Hs- | | |
| | strand | Mf-Mm) | | |
| MAPT- | 27 mer | 5984-6039- | ACCACUGAAGUCAAUUUAAAUGGAACU | 458 |
| 5984 | antisense | 4555 (Hs- | | |
| | strand | Mf-Mm) | | |
| MAPT- | 27 mer | 5985-6040- | CACCAUUGAAGUCAAUUUAAAUGGAAC | 459 |
| 5985 | antisense | 4556 (Hs- | | |
| | strand | Mf-Mm) | | |
| MAPT- | 27 mer | 6662-6723- | CCGAAUAAAUCAUGGGACUUGCAAGUG | 460 |
| 6662 | antisense | 5230 (Hs- | | |
| | strand | Mf-Mm) | | |
| MAPT- | 27 mer | 6663-6724- | ACCGAUGAAAUCAUGGGACUUGCAAGU | 461 |
| 6663 | antisense | 5231 (Hs- | | |
| | strand | Mf-Mm) | | |
| MAPT- | 27 mer | 6664-6725- | UACCGUAGAAAUCAUGGGACUUGCAAG | 462 |
| 6664 | antisense | 5232 (Hs- | | |
| | strand | Mf-Mm) | | |
| MAPT- | 27 mer | 6665-6726- | UUACCUAAGAAAUCAUGGGACUUGCAA | 463 |
| 6665 | antisense | 5233 (Hs- | | |
| | strand | Mf-Mm) | | |
| MAPT- | 27 mer | 6800-6861- | ACUUUUUUUCCAAAUUCACUUUUACAG | 464 |
| 6800 | antisense | 5365 (Hs- | | |
| | strand | Mf-Mm) | | |
| MAPT- | 27 mer | 6801-6862- | AACUUUAUUUCCAAAUUCACUUUUACA | 465 |
| 6801 | antisense | 5366 (Hs- | | |
| | strand | Mf-Mm) | | |
| MAPT- | 27 mer | 6802-6863- | UAACUUUAUUUCCAAAUUCACUUUUAC | 466 |
| 6802 | antisense | 5367 (Hs- | | |
| | strand | Mf-Mm) | | |
| MAPT- | 27 mer | 6803-6864- | AUAACUUUAUUUCCAAAUUCACUUUUA | 467 |
| 6803 | antisense | 5368 (Hs- | | |
| | strand | Mf-Mm) | | |
| MAPT- | 27 mer | 6804-6865- | AAUAAUUUUAUUUCCAAAUUCACUUUU | 468 |
| 6804 | antisense | 5369 (Hs- | | |
| | strand | Mf-Mm) | | |
| MAPT- | 27 mer | 6805-6866- | UAAUAUCUUUAUUUCCAAAUUCACUUU | 469 |
| 6805 | antisense | 5370 (Hs- | | |
| | strand | Mf-Mm) | | |
| MAPT- | 27 mer | 6806-6867- | GUAAUUACUUUAUUUCCAAAUUCACUU | 470 |
| 6806 | antisense | 5371 (Hs- | | |
| | strand | Mf-Mm) | | |
| MAPT- | 27 mer | 6807-6868- | AGUAAUAACUUUAUUUCCAAAUUCACU | 471 |
| 6807 | antisense | 5372 (Hs- | | |
| | strand | Mf-Mm) | | |
| MAPT- | 27 mer | 6808-6869- | GAGUAUUAACUUUAUUUCCAAAUUCAC | 472 |
| 6808 | antisense | 5373 (Hs- | | |
| | strand | Mf-Mm) | | |
| MAPT- | 27 mer | 6809-6870- | AGAGUUAUAACUUUAUUUCCAAAUUCA | 473 |
| 6809 | antisense | 5374 (Hs- | | |
| | strand | Mf-Mm) | | |
| MAPT- | 27 mer | 6810-6871- | CAGAGUAAUAACUUUAUUUCCAAAUUC | 474 |
| 6810 | antisense | 5375 (Hs- | | |
| | strand | Mf-Mm) | | |
| MAPT- | 27 mer | 6811-6872- | UCAGAUUAAUAACUUUAUUUCCAAAUU | 475 |
| 6811 | antisense | 5376 (Hs- | | |
| | strand | Mf-Mm) | | |
| MAPT- | 27 mer | 6812-6873- | AUCAGUGUAAUAACUUUAUUUCCAAAU | 476 |
| 6812 | antisense | 5377 (Hs- | | |
| | strand | Mf-Mm) | | |
| MAPT- | 27 mer | 6813-6874- | AAUCAUAGUAAUAACUUUAUUUCCAAA | 477 |
| 6813 | antisense | 5378 (Hs- | | |
| | strand | Mf-Mm) | | |
| MAPT- | 27 mer | 6814-6875- | UAAUCUGAGUAAUAACUUUAUUUCCAA | 478 |
| 6814 | antisense | 5379 (Hs- | | |
| | strand | Mf-Mm) | | |
| MAPT- | 27 mer | 6815-6876- | UUAAUUAGAGUAAUAACUUUAUUUCCA | 479 |
| 6815 | antisense | 5380 (Hs- | | |
| | strand | Mf-Mm) | | |
| MAPT- | 27 mer | 6816-6877- | UUUAAUCAGAGUAAUAACUUUAUUUCC | 480 |
| 6816 | antisense | 5381 (Hs- | | |
| | strand | Mf-Mm) | | |
| MAPT- | 27 mer | 363 (Hs) | UGAUCUUCCAUCACUUCGAACUCCUGG | 481 |
| 363 | antisense | | | |
| | strand | | | |
| MAPT- | 27 mer | 364 (Hs) | GUGAUUUUCCAUCACUUCGAACUCCUG | 482 |
| 364 | antisense | | | |
| | strand | | | |
| MAPT- | 27 mer | 365 (Hs) | CGUGAUCUUCCAUCACUUCGAACUCCU | 483 |
| 365 | antisense | | | |
| | strand | | | |
| MAPT- | 27 mer | 367 (Hs) | AGCGUUAUCUUCCAUCACUUCGAACUC | 484 |
| 367 | antisense | | | |
| | strand | | | |
| MAPT- | 27 mer | 369 (Hs) | CCAGCUUGAUCUUCCAUCACUUCGAAC | 485 |
| 369 | antisense | | | |
| | strand | | | |
| MAPT- | 27 mer | 374-226 | ACGUCUCAGCGUGAUCUUCCAUCACUU | 486 |
| 374 | antisense | (Hs-Mf) | | |
| | strand | | | |
| MAPT- | 27 mer | 395-247 | CUUUCUUGUCCCCCAACCCGUACGUCC | 487 |
| 395 | antisense | (Hs-Mf) | | |
| | strand | | | |
| MAPT- | 27 mer | 400-252 | CUGAUUUUUCCUGUCCCCCAACCCGUA | 488 |
| 400 | antisense | (Hs-Mf) | | |
| | strand | | | |
| MAPT- | 27 mer | 443-295 | CGUCCUUGUCACCCUCUUGGUCUUGGU | 489 |
| 443 | antisense | (Hs-Mf) | | |
| | strand | | | |
| MAPT- | 27 mer | 688-453 | CACGUUACCAGCAGCUUCGUCUUCCAG | 490 |
| 688 | antisense | (Hs-Mf) | | |
| | strand | | | |
| MAPT- | 27 mer | 689-454 | UCACGUGACCAGCAGCUUCGUCUUCCA | 491 |
| 689 | antisense | (Hs-Mf) | | |
| | strand | | | |
| MAPT- | 27 mer | 690-455 | GUCACUUGACCAGCAGCUUCGUCUUCC | 492 |
| 690 | antisense | (Hs-Mf) | | |
| | strand | | | |
| MAPT- | 27 mer | 693-458 | UGGGUUACGUGACCAGCAGCUUCGUCU | 493 |
| 693 | antisense | (Hs-Mf) | | |
| | strand | | | |
| MAPT- | 27 mer | 695-460 | CUUGGUUCACGUGACCAGCAGCUUCGU | 494 |
| 695 | antisense | (Hs-Mf) | | |
| | strand | | | |
| MAPT- | 27 mer | 696-461 | UCUUGUGUCACGUGACCAGCAGCUUCG | 495 |
| 696 | antisense | (Hs-Mf) | | |
| | strand | | | |
| MAPT- | 27 mer | 1475-1552 | CGUCUUUGCUUUUACUGACCAUGCGAG | 496 |
| 1475 | antisense | (Hs-Mf) | | |
| | strand | | | |
| MAPT- | 27 mer | 1476-1553 | CCGUCUUUGCUUUUACUGACCAUGCGA | 497 |
| 1476 | antisense | (Hs-Mf) | | |
| | strand | | | |
| MAPT- | 27 mer | 1479-1556 | GUCCCUUCUUUGCUUUUACUGACCAUG | 498 |
| 1479 | antisense | (Hs-Mf) | | |
| | strand | | | |
| MAPT- | 27 mer | 1480-1557 | AGUCCUGUCUUUGCUUUUACUGACCAU | 499 |
| 1480 | antisense | (Hs-Mf) | | |
| | strand | | | |
| MAPT- | 27 mer | 1481-1558 | CAGUCUCGUCUUUGCUUUUACUGACCA | 500 |
| 1481 | antisense | (Hs-Mf) | | |
| | strand | | | |
| MAPT- | 27 mer | 1484-1561 | UUCCAUUCCCGUCUUUGCUUUUACUGA | 501 |
| 1484 | antisense | (Hs-Mf) | | |
| | strand | | | |
| MAPT- | 27 mer | 1485-1562 | CUUCCUGUCCCGUCUUUGCUUUUACUG | 502 |
| 1485 | antisense | (Hs-Mf) | | |
| | strand | | | |
| MAPT- | 27 mer | 1492-1569 | GUCAUUGCUUCCAGUCCCGUCUUUGCU | 503 |
| 1492 | antisense | (Hs-Mf) | | |
| | strand | | | |
| MAPT- | 27 mer | 1494-1571 | UUGUCUUCGCUUCCAGUCCCGUCUUUG | 504 |
| 1494 | antisense | (Hs-Mf) | | |
| | strand | | | |
| MAPT- | 27 mer | 1495-1572 | UUUGUUAUCGCUUCCAGUCCCGUCUUU | 505 |
| 1495 | antisense | (Hs-Mf) | | |
| | strand | | | |
| MAPT- | 27 mer | 1498-1575 | UUUUUUGUCAUCGCUUCCAGUCCCGUC | 506 |
| 1498 | antisense | (Hs-Mf) | | |
| | strand | | | |
| MAPT- | 27 mer | 1499-1576 | CUUUUUUGUCAUCGCUUCCAGUCCCGU | 507 |
| 1499 | antisense | (Hs-Mf) | | |
| | strand | | | |
| MAPT- | 27 mer | 1500-1577 | GCUUUUUUGUCAUCGCUUCCAGUCCCG | 508 |
| 1500 | antisense | (Hs-Mf) | | |
| | strand | | | |
| MAPT- | 27 mer | 1502-1579 | UGGCUUUUUUGUCAUCGCUUCCAGUCC | 509 |
| 1502 | antisense | (Hs-Mf) | | |
| | strand | | | |
| MAPT- | 27 mer | 1503-1580 | UUGGCUUUUUUGUCAUCGCUUCCAGUC | 510 |
| 1503 | antisense | (Hs-Mf) | | |
| | strand | | | |
| MAPT- | 27 mer | 1504-1581 | CUUGGUUUUUUUGUCAUCGCUUCCAGU | 511 |
| 1504 | antisense | (Hs-Mf) | | |
| | strand | | | |
| MAPT- | 27 mer | 1505-1582 | UCUUGUCUUUUUUGUCAUCGCUUCCAG | 512 |
| 1505 | antisense | (Hs-Mf) | | |
| | strand | | | |
| MAPT- | 27 mer | 1506-1583 | GUCUUUGCUUUUUUGUCAUCGCUUCCA | 513 |
| 1506 | antisense | (Hs-Mf) | | |
| | strand | | | |
| MAPT- | 27 mer | 1507-1584 | UGUCUUGGCUUUUUUGUCAUCGCUUCC | 514 |
| 1507 | antisense | (Hs-Mf) | | |
| | strand | | | |
| MAPT- | 27 mer | 1508-1585 | AUGUCUUGGCUUUUUUGUCAUCGCUUC | 515 |
| 1508 | antisense | (Hs-Mf) | | |
| | strand | | | |
| MAPT- | 27 mer | 1509-1586 | GAUGUUUUGGCUUUUUUGUCAUCGCUU | 516 |
| 1509 | antisense | (Hs-Mf) | | |
| | strand | | | |
| MAPT- | 27 mer | 1733 (Hs) | GUGUGUCGAUCUUCGUUUUACCAUCAG | 517 |
| 1733 | antisense | | | |
| | strand | | | |
| MAPT- | 27 mer | 1796-1873 | UUUUUUCUGGAAUCCUGGUGGCGUUGG | 518 |
| 1796 | antisense | (Hs-Mf) | | |
| | strand | | | |
| MAPT- | 27 mer | 1835-1912 | UAGUCUCAGAGCUGGGUGGUGUCUUUG | 519 |
| 1835 | antisense | (Hs-Mf) | | |
| | strand | | | |
| MAPT- | 27 mer | 1912-1989 | GCUGCUAUCCCCUGAUUUUGGAGGUUC | 520 |
| 1912 | antisense | (Hs-Mf) | | |
| | strand | | | |
| MAPT- | 27 mer | 2094-2171 | ACAUUUUUCAGGUCUGGCAUGGGCACG | 521 |
| 2094 | antisense | (Hs-Mf) | | |
| | strand | | | |
| MAPT- | 27 mer | 2096-2173 | UGACAUUCUUCAGGUCUGGCAUGGGCA | 522 |
| 2096 | antisense | (Hs-Mf) | | |
| | strand | | | |
| MAPT- | 27 mer | 2097-2174 | UUGACUUUCUUCAGGUCUGGCAUGGGC | 523 |
| 2097 | antisense | (Hs-Mf) | | |
| | strand | | | |
| MAPT- | 27 mer | 2098 (Hs) | CUUGAUAUUCUUCAGGUCUGGCAUGGG | 524 |
| 2098 | antisense | | | |
| | strand | | | |
| MAPT- | 27 mer | 2105 (Hs) | UCUUGUACUUGACAUUCUUCAGGUCUG | 525 |
| 2105 | antisense | | | |
| | strand | | | |
| MAPT- | 27 mer | 2106 (Hs) | AUCUUUGACUUGACAUUCUUCAGGUCU | 526 |
| 2106 | antisense | | | |
| | strand | | | |
| MAPT- | 27 mer | 2107 (Hs) | GAUCUUGGACUUGACAUUCUUCAGGUC | 527 |
| 2107 | antisense | | | |
| | strand | | | |
| MAPT- | 27 mer | 2108 (Hs) | CGAUCUUGGACUUGACAUUCUUCAGGU | 528 |
| 2108 | antisense | | | |
| | strand | | | |
| MAPT- | 27 mer | 2109 (Hs) | CCGAUUUUGGACUUGACAUUCUUCAGG | 529 |
| 2109 | antisense | | | |
| | strand | | | |
| MAPT- | 27 mer | 2117-2194 | CAGUGUAGCCGAUCUUGGACUUGACAU | 530 |
| 2117 | antisense | (Hs-Mf) | | |
| | strand | | | |
| MAPT- | 27 mer | 2136 (Hs) | GGCUGUUGCUUCAGGUUCUCAGUGGAG | 531 |
| 2136 | antisense | | | |
| | strand | | | |
| MAPT- | 27 mer | 2137 (Hs) | CGGCUUGUGCUUCAGGUUCUCAGUGGA | 532 |
| 2137 | antisense | | | |
| | strand | | | |
| MAPT- | 27 mer | 2269-2346 | GUCAAUUGGUUUGUAGACUAUUUGCAC | 533 |
| 2269 | antisense | (Hs-Mf) | | |
| | strand | | | |
| MAPT- | 27 mer | 2270-2347 | GGUCAUCUGGUUUGUAGACUAUUUGCA | 534 |
| 2270 | antisense | (Hs-Mf) | | |
| | strand | | | |
| MAPT- | 27 mer | 2271-2348 | AGGUCUACUGGUUUGUAGACUAUUUGC | 535 |
| 2271 | antisense | (Hs-Mf) | | |
| | strand | | | |
| MAPT- | 27 mer | 2272-2349 | CAGGUUAACUGGUUUGUAGACUAUUUG | 536 |
| 2272 | antisense | (Hs-Mf) | | |
| | strand | | | |
| MAPT- | 27 mer | 2273-2350 | UCAGGUCAACUGGUUUGUAGACUAUUU | 537 |
| 2273 | antisense | (Hs-Mf) | | |
| | strand | | | |
| MAPT- | 27 mer | 2274-2351 | CUCAGUUCAACUGGUUUGUAGACUAUU | 538 |
| 2274 | antisense | (Hs-Mf) | | |
| | strand | | | |
| MAPT- | 27 mer | 2275-2352 | GCUCAUGUCAACUGGUUUGUAGACUAU | 539 |
| 2275 | antisense | (Hs-Mf) | | |
| | strand | | | |
| MAPT- | 27 mer | 2276-2353 | UGCUCUGGUCAACUGGUUUGUAGACUA | 540 |
| 2276 | antisense | (Hs-Mf) | | |
| | strand | | | |
| MAPT- | 27 mer | 2277-2354 | UUGCUUAGGUCAACUGGUUUGUAGACU | 541 |
| 2277 | antisense | (Hs-Mf) | | |
| | strand | | | |
| MAPT- | 27 mer | 2278-2355 | CUUGCUCAGGUCAACUGGUUUGUAGAC | 542 |
| 2278 | antisense | (Hs-Mf) | | |
| | strand | | | |
| MAPT- | 27 mer | 2279-2356 | CCUUGUUCAGGUCAACUGGUUUGUAGA | 543 |
| 2279 | antisense | (Hs-Mf) | | |
| | strand | | | |
| MAPT- | 27 mer | 2280-2357 | ACCUUUCUCAGGUCAACUGGUUUGUAG | 544 |
| 2280 | antisense | (Hs-Mf) | | |
| | strand | | | |
| MAPT- | 27 mer | 2281-2358 | CACCUUGCUCAGGUCAACUGGUUUGUA | 545 |
| 2281 | antisense | (Hs-Mf) | | |
| | strand | | | |
| MAPT- | 27 mer | 2282-2359 | UCACCUUGCUCAGGUCAACUGGUUUGU | 546 |
| 2282 | antisense | (Hs-Mf) | | |
| | strand | | | |
| MAPT- | 27 mer | 2283-2360 | GUCACUUUGCUCAGGUCAACUGGUUUG | 547 |
| 2283 | antisense | (Hs-Mf) | | |
| | strand | | | |
| MAPT- | 27 mer | 2284-2361 | GGUCAUCUUGCUCAGGUCAACUGGUUU | 548 |
| 2284 | antisense | (Hs-Mf) | | |
| | strand | | | |
| MAPT- | 27 mer | 2286-2363 | GAGGUUACCUUGCUCAGGUCAACUGGU | 549 |
| 2286 | antisense | (Hs-Mf) | | |
| | strand | | | |
| MAPT- | 27 mer | 2288-2365 | UGGAGUUCACCUUGCUCAGGUCAACUG | 550 |
| 2288 | antisense | (Hs-Mf) | | |
| | strand | | | |
| MAPT- | 27 mer | 2289-2366 | UUGGAUGUCACCUUGCUCAGGUCAACU | 551 |
| 2289 | antisense | (Hs-Mf) | | |
| | strand | | | |
| MAPT- | 27 mer | 2291-2368 | ACUUGUAGGUCACCUUGCUCAGGUCAA | 552 |
| 2291 | antisense | (Hs-Mf) | | |
| | strand | | | |
| MAPT- | 27 mer | 2294-2371 | CACACUUGGAGGUCACCUUGCUCAGGU | 553 |
| 2294 | antisense | (Hs-Mf) | | |
| | strand | | | |
| MAPT- | 27 mer | 2299-2376 | UGAGCUACACUUGGAGGUCACCUUGCU | 554 |
| 2299 | antisense | (Hs-Mf) | | |
| | strand | | | |
| MAPT- | 27 mer | 2300-2377 | AUGAGUCACACUUGGAGGUCACCUUGC | 555 |
| 2300 | antisense | (Hs-Mf) | | |
| | strand | | | |
| MAPT- | 27 mer | 2301-2378 | AAUGAUCCACACUUGGAGGUCACCUUG | 556 |
| 2301 | antisense | (Hs-Mf) | | |
| | strand | | | |
| MAPT- | 27 mer | 2308-2385 | GUUGCUUAAUGAGCCACACUUGGAGGU | 557 |
| 2308 | antisense | (Hs-Mf) | | |
| | strand | | | |
| MAPT- | 27 mer | 2316-2393 | UGAUGUAUGUUGCCUAAUGAGCCACAC | 558 |
| 2316 | antisense | (Hs-Mf) | | |
| | strand | | | |
| MAPT- | 27 mer | 2317-2394 | AUGAUUGAUGUUGCCUAAUGAGCCACA | 559 |
| 2317 | antisense | (Hs-Mf) | | |
| | strand | | | |
| MAPT- | 27 mer | 2319-2396 | UUAUGUUGGAUGUUGCCUAAUGAGCCA | 560 |
| 2319 | antisense | (Hs-Mf) | | |
| | strand | | | |
| MAPT- | 27 mer | 2320-2397 | UUUAUUAUGGAUGUUGCCUAAUGAGCC | 561 |
| 2320 | antisense | (Hs-Mf) | | |
| | strand | | | |
| MAPT- | 27 mer | 2322-2399 | GGUUUUUGAUGGAUGUUGCCUAAUGAG | 562 |
| 2322 | antisense | (Hs-Mf) | | |
| | strand | | | |
| MAPT- | 27 mer | 2323-2400 | UGGUUUAUGAUGGAUGUUGCCUAAUGA | 563 |
| 2323 | antisense | (Hs-Mf) | | |
| | strand | | | |
| MAPT- | 27 mer | 2324-2401 | CUGGUUUAUGAUGGAUGUUGCCUAAUG | 564 |
| 2324 | antisense | (Hs-Mf) | | |
| | strand | | | |
| MAPT- | 27 mer | 2326-2403 | UCCUGUUUUAUGAUGGAUGUUGCCUAA | 565 |
| 2326 | antisense | (Hs-Mf) | | |
| | strand | | | |
| MAPT- | 27 mer | 2330-2407 | CACCUUCUGGUUUAUGAUGGAUGUUGC | 566 |
| 2330 | antisense | (Hs-Mf) | | |
| | strand | | | |
| MAPT- | 27 mer | 2356-2433 | CUUCUUAGAUUUUACUUCCACCUGGCC | 567 |
| 2356 | antisense | (Hs-Mf) | | |
| | strand | | | |
| MAPT- | 27 mer | 2357-2434 | GCUUCUCAGAUUUUACUUCCACCUGGC | 568 |
| 2357 | antisense | (Hs-Mf) | | |
| | strand | | | |
| MAPT- | 27 mer | 2358-2435 | AGCUUUUCAGAUUUUACUUCCACCUGG | 569 |
| 2358 | antisense | (Hs-Mf) | | |
| | strand | | | |
| MAPT- | 27 mer | 2359-2436 | AAGCUUCUCAGAUUUUACUUCCACCUG | 570 |
| 2359 | antisense | (Hs-Mf) | | |
| | strand | | | |
| MAPT- | 27 mer | 2360-2437 | CAAGCUUCUCAGAUUUUACUUCCACCU | 571 |
| 2360 | antisense | (Hs-Mf) | | |
| | strand | | | |
| MAPT- | 27 mer | 2361-2438 | UCAAGUUUCUCAGAUUUUACUUCCACC | 572 |
| 2361 | antisense | (Hs-Mf) | | |
| | strand | | | |
| MAPT- | 27 mer | 2362-2439 | GUCAAUCUUCUCAGAUUUUACUUCCAC | 573 |
| 2362 | antisense | (Hs-Mf) | | |
| | strand | | | |
| MAPT- | 27 mer | 2363-2440 | AGUCAUGCUUCUCAGAUUUUACUUCCA | 574 |
| 2363 | antisense | (Hs-Mf) | | |
| | strand | | | |
| MAPT- | 27 mer | 2364-2441 | AAGUCUAGCUUCUCAGAUUUUACUUCC | 575 |
| 2364 | antisense | (Hs-Mf) | | |
| | strand | | | |
| MAPT- | 27 mer | 2365 (Hs) | GAAGUUAAGCUUCUCAGAUUUUACUUC | 576 |
| 2365 | antisense | | | |
| | strand | | | |
| MAPT- | 27 mer | 2372 (Hs) | UGUCCUUGAAGUCAAGCUUCUCAGAUU | 577 |
| 2372 | antisense | | | |
| | strand | | | |
| MAPT- | 27 mer | 2373 (Hs) | CUGUCUUUGAAGUCAAGCUUCUCAGAU | 578 |
| 2373 | antisense | | | |
| | strand | | | |
| MAPT- | 27 mer | 2374 (Hs) | UCUGUUCUUGAAGUCAAGCUUCUCAGA | 579 |
| 2374 | antisense | | | |
| | strand | | | |
| MAPT- | 27 mer | 2375 (Hs) | CUCUGUCCUUGAAGUCAAGCUUCUCAG | 580 |
| 2375 | antisense | | | |
| | strand | | | |
| MAPT- | 27 mer | 2376 (Hs) | ACUCUUUCCUUGAAGUCAAGCUUCUCA | 581 |
| 2376 | antisense | | | |
| | strand | | | |
| MAPT- | 27 mer | 2377 (Hs) | GACUCUGUCCUUGAAGUCAAGCUUCUC | 582 |
| 2377 | antisense | | | |
| | strand | | | |
| MAPT- | 27 mer | 2378 (Hs) | GGACUUUGUCCUUGAAGUCAAGCUUCU | 583 |
| 2378 | antisense | | | |
| | strand | | | |
| MAPT- | 27 mer | 2379 (Hs) | UGGACUCUGUCCUUGAAGUCAAGCUUC | 584 |
| 2379 | antisense | | | |
| | strand | | | |
| MAPT- | 27 mer | 2380 (Hs) | CUGGAUUCUGUCCUUGAAGUCAAGCUU | 585 |
| 2380 | antisense | | | |
| | strand | | | |
| MAPT- | 27 mer | 2381 (Hs) | ACUGGUCUCUGUCCUUGAAGUCAAGCU | 586 |
| 2381 | antisense | | | |
| | strand | | | |
| MAPT- | 27 mer | 2382 (Hs) | GACUGUACUCUGUCCUUGAAGUCAAGC | 587 |
| 2382 | antisense | | | |
| | strand | | | |
| MAPT- | 27 mer | 2390 (Hs) | CAAUCUUCGACUGGACUCUGUCCUUGA | 588 |
| 2390 | antisense | | | |
| | strand | | | |
| MAPT- | 27 mer | 2391 (Hs) | CCAAUUUUCGACUGGACUCUGUCCUUG | 589 |
| 2391 | antisense | | | |
| | strand | | | |
| MAPT- | 27 mer | 2414-2491 | CGUGGUUGAUAUUGUCCAGGGACCCAA | 590 |
| 2414 | antisense | (Hs-Mf) | | |
| | strand | | | |
| MAPT- | 27 mer | 2448-2525 | UGGGUUUCAAUCUUUUUAUUUCCUCCG | 591 |
| 2448 | antisense | (Hs-Mf) | | |
| | strand | | | |
| MAPT- | 27 mer | 2449-2526 | GUGGGUUUCAAUCUUUUUAUUUCCUCC | 592 |
| 2449 | antisense | (Hs-Mf) | | |
| | strand | | | |
| MAPT- | 27 mer | 2450-2527 | UGUGGUUUUCAAUCUUUUUAUUUCCUC | 593 |
| 2450 | antisense | (Hs-Mf) | | |
| | strand | | | |
| MAPT- | 27 mer | 2451-2528 | UUGUGUGUUUCAAUCUUUUUAUUUCCU | 594 |
| 2451 | antisense | (Hs-Mf) | | |
| | strand | | | |
| MAPT- | 27 mer | 2452-2529 | CUUGUUGGUUUCAAUCUUUUUAUUUCC | 595 |
| 2452 | antisense | (Hs-Mf) | | |
| | strand | | | |
| MAPT- | 27 mer | 2453-2530 | GCUUGUGGGUUUCAAUCUUUUUAUUUC | 596 |
| 2453 | antisense | (Hs-Mf) | | |
| | strand | | | |
| MAPT- | 27 mer | 2454-2531 | AGCUUUUGGGUUUCAAUCUUUUUAUUU | 597 |
| 2454 | antisense | (Hs-Mf) | | |
| | strand | | | |
| MAPT- | 27 mer | 2456-2533 | UCAGCUUGUGGGUUUCAAUCUUUUUAU | 598 |
| 2456 | antisense | (Hs-Mf) | | |
| | strand | | | |
| MAPT- | 27 mer | 2457-2534 | GUCAGUUUGUGGGUUUCAAUCUUUUUA | 599 |
| 2457 | antisense | (Hs-Mf) | | |
| | strand | | | |
| MAPT- | 27 mer | 2567 (Hs) | UGGAGUAGACAUUGCUGAGAUGCCGUG | 600 |
| 2567 | antisense | | | |
| | strand | | | |
| MAPT- | 27 mer | 2598-2675 | UGGGGUGAGUCUACCAUGUCGAUGCUG | 601 |
| 2598 | antisense | (Hs-Mf) | | |
| | strand | | | |
| MAPT- | 27 mer | 2657-2734 | CUGAUUACAAACCCUGCUUGGCCAGGG | 602 |
| 2657 | antisense | (Hs-Mf) | | |
| | strand | | | |
| MAPT- | 27 mer | 2723-2800 | AUUAUUCUUUUUUUUUCCACACUCUCU | 603 |
| 2723 | antisense | (Hs-Mf) | | |
| | strand | | | |
| MAPT- | 27 mer | 2724-2801 | CAUUAUUCUUUUUUUUUCCACACUCUC | 604 |
| 2724 | antisense | (Hs-Mf) | | |
| | strand | | | |
| MAPT- | 27 mer | 2726-2803 | GUCAUUAUUCUUUUUUUUUCCACACUC | 605 |
| 2726 | antisense | (Hs-Mf) | | |
| | strand | | | |
| MAPT- | 27 mer | 2784-2860- | GUGAUUAACCAAUUAACCGAACUGCGA | 606 |
| 2784 | antisense | 1 mismatch | | |
| | strand | (Hs-Mf) | | |
| MAPT- | 27 mer | 2963-3039 | GAAAAUAGAAUCAAAAGGAAUUGCCUG | 607 |
| 2963 | antisense | (Hs-Mf) | | |
| | strand | | | |
| MAPT- | 27 mer | 3110-3186 | ACCAAUUUUCAAAUCCUUUGUUGCUGC | 608 |
| 3110 | antisense | (Hs-Mf) | | |
| | strand | | | |
| MAPT- | 27 mer | 3114-3190 | ACACAUCAAGUUUCAAAUCCUUUGUUG | 609 |
| 3114 | antisense | (Hs-Mf) | | |
| | strand | | | |
| MAPT- | 27 mer | 3116-3192 | GAACAUACCAAGUUUCAAAUCCUUUGU | 610 |
| 3116 | antisense | (Hs-Mf) | | |
| | strand | | | |
| MAPT- | 27 mer | 3118-3194 | ACGAAUACACCAAGUUUCAAAUCCUUU | 611 |
| 3118 | antisense | (Hs-Mf) | | |
| | strand | | | |
| MAPT- | 27 mer | 3158-3234 | UCACAUUCACACAAGGUUGACAUCGUC | 612 |
| 3158 | antisense | (Hs-Mf) | | |
| | strand | | | |
| MAPT- | 27 mer | 3503-3576 | UCUCAUGACAUCAAGGUCAGUCUUUUC | 613 |
| 3503 | antisense | (Hs-Mf) | | |
| | strand | | | |
| MAPT- | 27 mer | 3589-3661 | UCAAUUAAACAGGGUUUCUGUGGAGCA | 614 |
| 3589 | antisense | (Hs-Mf) | | |
| | strand | | | |
| MAPT- | 27 mer | 3591-3663 | ACUCAUUAAAACAGGGUUUCUGUGGAG | 615 |
| 3591 | antisense | (Hs-Mf) | | |
| | strand | | | |
| MAPT- | 27 mer | 3592-3664 | AACUCUAUAAAACAGGGUUUCUGUGGA | 616 |
| 3592 | antisense | (Hs-Mf) | | |
| | strand | | | |
| MAPT- | 27 mer | 3593-3665 | GAACUUAAUAAAACAGGGUUUCUGUGG | 617 |
| 3593 | antisense | (Hs-Mf) | | |
| | strand | | | |
| MAPT- | 27 mer | 3594-3666 | AGAACUCAAUAAAACAGGGUUUCUGUG | 618 |
| 3594 | antisense | (Hs-Mf) | | |
| | strand | | | |
| MAPT- | 27 mer | 3595-3667 | CAGAAUUCAAUAAAACAGGGUUUCUGU | 619 |
| 3595 | antisense | (Hs-Mf) | | |
| | strand | | | |
| MAPT- | 27 mer | 3596-3668 | UCAGAUCUCAAUAAAACAGGGUUUCUG | 620 |
| 3596 | antisense | (Hs-Mf) | | |
| | strand | | | |
| MAPT- | 27 mer | 3597-3669 | UUCAGUACUCAAUAAAACAGGGUUUCU | 621 |
| 3597 | antisense | (Hs-Mf) | | |
| | strand | | | |
| MAPT- | 27 mer | 3598-3670 | CUUCAUAACUCAAUAAAACAGGGUUUC | 622 |
| 3598 | antisense | (Hs-Mf) | | |
| | strand | | | |
| MAPT- | 27 mer | 3599-3671 | CCUUCUGAACUCAAUAAAACAGGGUUU | 623 |
| 3599 | antisense | (Hs-Mf) | | |
| | strand | | | |
| MAPT- | 27 mer | 3600-3672 | ACCUUUAGAACUCAAUAAAACAGGGUU | 624 |
| 3600 | antisense | (Hs-Mf) | | |
| | strand | | | |
| MAPT- | 27 mer | 3601-3673 | AACCUUCAGAACUCAAUAAAACAGGGU | 625 |
| 3601 | antisense | (Hs-Mf) | | |
| | strand | | | |
| MAPT- | 27 mer | 3602-3674 | CAACCUUCAGAACUCAAUAAAACAGGG | 626 |
| 3602 | antisense | (Hs-Mf) | | |
| | strand | | | |
| MAPT- | 27 mer | 3603-3675 | CCAACUUUCAGAACUCAAUAAAACAGG | 627 |
| 3603 | antisense | (Hs-Mf) | | |
| | strand | | | |
| MAPT- | 27 mer | 3605-3677 | UUCCAUCCUUCAGAACUCAAUAAAACA | 628 |
| 3605 | antisense | (Hs-Mf) | | |
| | strand | | | |
| MAPT- | 27 mer | 3607-3679 | AGUUCUAACCUUCAGAACUCAAUAAAA | 629 |
| 3607 | antisense | (Hs-Mf) | | |
| | strand | | | |
| MAPT- | 27 mer | 3609-3681 | GCAGUUCCAACCUUCAGAACUCAAUAA | 630 |
| 3609 | antisense | (Hs-Mf) | | |
| | strand | | | |
| MAPT- | 27 mer | 3610-3682 | AGCAGUUCCAACCUUCAGAACUCAAUA | 631 |
| 3610 | antisense | (Hs-Mf) | | |
| | strand | | | |
| MAPT- | 27 mer | 3677-3749 | CAAGUUCUUACAAAGAGAACUGGUUAG | 632 |
| 3677 | antisense | (Hs-Mf) | | |
| | strand | | | |
| MAPT- | 27 mer | 3678-3750 | ACAAGUCCUUACAAAGAGAACUGGUUA | 633 |
| 3678 | antisense | (Hs-Mf) | | |
| | strand | | | |
| MAPT- | 27 mer | 3679-3751 | CACAAUUCCUUACAAAGAGAACUGGUU | 634 |
| 3679 | antisense | (Hs-Mf) | | |
| | strand | | | |
| MAPT- | 27 mer | 3680-3752 | GCACAUGUCCUUACAAAGAGAACUGGU | 635 |
| 3680 | antisense | (Hs-Mf) | | |
| | strand | | | |
| MAPT- | 27 mer | 3958-4030 | UAAUUUCACCCUCAGUAUGGAGUAGGU | 636 |
| 3958 | antisense | (Hs-Mf) | | |
| | strand | | | |
| MAPT- | 27 mer | 3959-4031 | UUAAUUUCACCCUCAGUAUGGAGUAGG | 637 |
| 3959 | antisense | (Hs-Mf) | | |
| | strand | | | |
| MAPT- | 27 mer | 3960-4032 | CUUAAUUUCACCCUCAGUAUGGAGUAG | 638 |
| 3960 | antisense | (Hs-Mf) | | |
| | strand | | | |
| MAPT- | 27 mer | 3961-4033 | CCUUAUUUUCACCCUCAGUAUGGAGUA | 639 |
| 3961 | antisense | (Hs-Mf) | | |
| | strand | | | |
| MAPT- | 27 mer | 3965-4037 | CUUCCUUUAAUUUCACCCUCAGUAUGG | 640 |
| 3965 | antisense | (Hs-Mf) | | |
| | strand | | | |
| MAPT- | 27 mer | 3970-4042 | UUUGCUUUCCCUUAAUUUCACCCUCAG | 641 |
| 3970 | antisense | (Hs-Mf) | | |
| | strand | | | |
| MAPT- | 27 mer | 4146-4218 | UCCAUUUCAACAAGGCAGAAACACCUA | 642 |
| 4146 | antisense | (Hs-Mf) | | |
| | strand | | | |
| MAPT- | 27 mer | 4474-4545 | CUAUGUAUAUGUUCAGCUGCUCCAGCA | 643 |
| 4474 | antisense | (Hs-Mf) | | |
| | strand | | | |
| MAPT- | 27 mer | 4475-4546 | UCUAUUUAUAUGUUCAGCUGCUCCAGC | 644 |
| 4475 | antisense | (Hs-Mf) | | |
| | strand | | | |
| MAPT- | 27 mer | 4477-4548 | CAUCUUUGUAUAUGUUCAGCUGCUCCA | 645 |
| 4477 | antisense | (Hs-Mf) | | |
| | strand | | | |
| MAPT- | 27 mer | 4478-4549 | ACAUCUAUGUAUAUGUUCAGCUGCUCC | 646 |
| 4478 | antisense | (Hs-Mf) | | |
| | strand | | | |
| MAPT- | 27 mer | 4479-4550 | AACAUUUAUGUAUAUGUUCAGCUGCUC | 647 |
| 4479 | antisense | (Hs-Mf) | | |
| | strand | | | |
| MAPT- | 27 mer | 4480-4551 | CAACAUCUAUGUAUAUGUUCAGCUGCU | 648 |
| 4480 | antisense | (Hs-Mf) | | |
| | strand | | | |
| MAPT- | 27 mer | 4481-4552 | GCAACUUCUAUGUAUAUGUUCAGCUGC | 649 |
| 4481 | antisense | (Hs-Mf) | | |
| | strand | | | |
| MAPT- | 27 mer | 4482-4553 | GGCAAUAUCUAUGUAUAUGUUCAGCUG | 650 |
| 4482 | antisense | (Hs-Mf) | | |
| | strand | | | |
| MAPT- | 27 mer | 4485-4556 | CAGGGUAACAUCUAUGUAUAUGUUCAG | 651 |
| 4485 | antisense | (Hs-Mf) | | |
| | strand | | | |
| MAPT- | 27 mer | 4486-4557 | GCAGGUCAACAUCUAUGUAUAUGUUCA | 652 |
| 4486 | antisense | (Hs-Mf) | | |
| | strand | | | |
| MAPT- | 27 mer | 4532 (Hs) | AAACAUACAAAUCCAACUACAACUCAA | 653 |
| 4532 | antisense | | | |
| | strand | | | |
| MAPT- | 27 mer | 4533 (Hs) | UAAACUGACAAAUCCAACUACAACUCA | 654 |
| 4533 | antisense | | | |
| | strand | | | |
| MAPT- | 27 mer | 4539-4610 | CAAGCUUAAACAGACAAAUCCAACUAC | 655 |
| 4539 | antisense | (Hs-Mf) | | |
| | strand | | | |
| MAPT- | 27 mer | 4540-4611 | CCAAGUAUAAACAGACAAAUCCAACUA | 656 |
| 4540 | antisense | (Hs-Mf) | | |
| | strand | | | |
| MAPT- | 27 mer | 4541-4612 | UCCAAUCAUAAACAGACAAAUCCAACU | 657 |
| 4541 | antisense | (Hs-Mf) | | |
| | strand | | | |
| MAPT- | 27 mer | 4543-4614 | AAUCCUAGCAUAAACAGACAAAUCCAA | 658 |
| 4543 | antisense | (Hs-Mf) | | |
| | strand | | | |
| MAPT- | 27 mer | 4544-4615 | GAAUCUAAGCAUAAACAGACAAAUCCA | 659 |
| 4544 | antisense | (Hs-Mf) | | |
| | strand | | | |
| MAPT- | 27 mer | 4545-4616 | UGAAUUCAAGCAUAAACAGACAAAUCC | 660 |
| 4545 | antisense | (Hs-Mf) | | |
| | strand | | | |
| MAPT- | 27 mer | 4546-4617 | GUGAAUCCAAGCAUAAACAGACAAAUC | 661 |
| 4546 | antisense | (Hs-Mf) | | |
| | strand | | | |
| MAPT- | 27 mer | 4547-4618 | GGUGAUUCCAAGCAUAAACAGACAAAU | 662 |
| 4547 | antisense | (Hs-Mf) | | |
| | strand | | | |
| MAPT- | 27 mer | 4548-4619 | UGGUGUAUCCAAGCAUAAACAGACAAA | 663 |
| 4548 | antisense | (Hs-Mf) | | |
| | strand | | | |
| MAPT- | 27 mer | 4549-4620 | CUGGUUAAUCCAAGCAUAAACAGACAA | 664 |
| 4549 | antisense | (Hs-Mf) | | |
| | strand | | | |
| MAPT- | 27 mer | 4550-4621 | UCUGGUGAAUCCAAGCAUAAACAGACA | 665 |
| 4550 | antisense | (Hs-Mf) | | |
| | strand | | | |
| MAPT- | 27 mer | 4551-4622 | CUCUGUUGAAUCCAAGCAUAAACAGAC | 666 |
| 4551 | antisense | (Hs-Mf) | | |
| | strand | | | |
| MAPT- | 27 mer | 4552-4623 | ACUCUUGUGAAUCCAAGCAUAAACAGA | 667 |
| 4552 | antisense | (Hs-Mf) | | |
| | strand | | | |
| MAPT- | 27 mer | 4554-4625 | UCACUUUGGUGAAUCCAAGCAUAAACA | 668 |
| 4554 | antisense | (Hs-Mf) | | |
| | strand | | | |
| MAPT- | 27 mer | 4556-4627 | AGUCAUUCUGGUGAAUCCAAGCAUAAA | 669 |
| 4556 | antisense | (Hs-Mf) | | |
| | strand | | | |
| MAPT- | 27 mer | 4557-4628 | UAGUCUCUCUGGUGAAUCCAAGCAUAA | 670 |
| 4557 | antisense | (Hs-Mf) | | |
| | strand | | | |
| MAPT- | 27 mer | 4558-4629 | AUAGUUACUCUGGUGAAUCCAAGCAUA | 671 |
| 4558 | antisense | (Hs-Mf) | | |
| | strand | | | |
| MAPT- | 27 mer | 4559-4630 | CAUAGUCACUCUGGUGAAUCCAAGCAU | 672 |
| 4559 | antisense | (Hs-Mf) | | |
| | strand | | | |
| MAPT- | 27 mer | 4560-4631 | UCAUAUUCACUCUGGUGAAUCCAAGCA | 673 |
| 4560 | antisense | (Hs-Mf) | | |
| | strand | | | |
| MAPT- | 27 mer | 4561-4632 | AUCAUUGUCACUCUGGUGAAUCCAAGC | 674 |
| 4561 | antisense | (Hs-Mf) | | |
| | strand | | | |
| MAPT- | 27 mer | 4562-4633 | UAUCAUAGUCACUCUGGUGAAUCCAAG | 675 |
| 4562 | antisense | (Hs-Mf) | | |
| | strand | | | |
| MAPT- | 27 mer | 4563-4634 | CUAUCUUAGUCACUCUGGUGAAUCCAA | 676 |
| 4563 | antisense | (Hs-Mf) | | |
| | strand | | | |
| MAPT- | 27 mer | 4564-4635 | ACUAUUAUAGUCACUCUGGUGAAUCCA | 677 |
| 4564 | antisense | (Hs-Mf) | | |
| | strand | | | |
| MAPT- | 27 mer | 4615-4687 | UACAAUCAUUUCAAGAUACAUGCGUCC | 678 |
| 4615 | antisense | (Hs-Mf) | | |
| | strand | | | |
| MAPT- | 27 mer | 4616-4688 | UUACAUGCAUUUCAAGAUACAUGCGUC | 679 |
| 4616 | antisense | (Hs-Mf) | | |
| | strand | | | |
| MAPT- | 27 mer | 4617-4689 | UUUACUAGCAUUUCAAGAUACAUGCGU | 680 |
| 4617 | antisense | (Hs-Mf) | | |
| | strand | | | |
| MAPT- | 27 mer | 4618-4690 | CUUUAUAAGCAUUUCAAGAUACAUGCG | 681 |
| 4618 | antisense | (Hs-Mf) | | |
| | strand | | | |
| MAPT- | 27 mer | 4619-4691 | UCUUUUCAAGCAUUUCAAGAUACAUGC | 682 |
| 4619 | antisense | (Hs-Mf) | | |
| | strand | | | |
| MAPT- | 27 mer | 4620-4692 | CUCUUUACAAGCAUUUCAAGAUACAUG | 683 |
| 4620 | antisense | (Hs-Mf) | | |
| | strand | | | |
| MAPT- | 27 mer | 4621-4693 | CCUCUUUACAAGCAUUUCAAGAUACAU | 684 |
| 4621 | antisense | (Hs-Mf) | | |
| | strand | | | |
| MAPT- | 27 mer | 4622-4694 | ACCUCUUUACAAGCAUUUCAAGAUACA | 685 |
| 4622 | antisense | (Hs-Mf) | | |
| | strand | | | |
| MAPT- | 27 mer | 4623-4695 | AACCUUUUUACAAGCAUUUCAAGAUAC | 686 |
| 4623 | antisense | (Hs-Mf) | | |
| | strand | | | |
| MAPT- | 27 mer | 4625-4697 | GAAACUUCUUUACAAGCAUUUCAAGAU | 687 |
| 4625 | antisense | (Hs-Mf) | | |
| | strand | | | |
| MAPT- | 27 mer | 4627-4699 | UAGAAUCCUCUUUACAAGCAUUUCAAG | 688 |
| 4627 | antisense | (Hs-Mf) | | |
| | strand | | | |
| MAPT- | 27 mer | 4628-4700 | UUAGAUACCUCUUUACAAGCAUUUCAA | 689 |
| 4628 | antisense | (Hs-Mf) | | |
| | strand | | | |
| MAPT- | 27 mer | 4629-4701 | GUUAGUAACCUCUUUACAAGCAUUUCA | 690 |
| 4629 | antisense | (Hs-Mf) | | |
| | strand | | | |
| MAPT- | 27 mer | 4630-4702 | GGUUAUAAACCUCUUUACAAGCAUUUC | 691 |
| 4630 | antisense | (Hs-Mf) | | |
| | strand | | | |
| MAPT- | 27 mer | 4632-4704 | UGGGUUAGAAACCUCUUUACAAGCAUU | 692 |
| 4632 | antisense | (Hs-Mf) | | |
| | strand | | | |
| MAPT- | 27 mer | 4633-4705 | GUGGGUUAGAAACCUCUUUACAAGCAU | 693 |
| 4633 | antisense | (Hs-Mf) | | |
| | strand | | | |
| MAPT- | 27 mer | 4825-4897 | AUCAUUGCUUCAGUCCUAAUCCUGUGC | 694 |
| 4825 | antisense | (Hs-Mf) | | |
| | strand | | | |
| MAPT- | 27 mer | 4828-4900 | GACAUUAUCGCUUCAGUCCUAAUCCUG | 695 |
| 4828 | antisense | (Hs-Mf) | | |
| | strand | | | |
| MAPT- | 27 mer | 5682-5743 | CUGAAUAGCAGGGCACAAGAACUUCAG | 696 |
| 5682 | antisense | (Hs-Mf) | | |
| | strand | | | |
| MAPT- | 27 mer | 5958 (Hs) | UAUUGUUAAAGUGAGUCAGCAGCUUGA | 697 |
| 5958 | antisense | | | |
| | strand | | | |
| MAPT- | 27 mer | 5959 (Hs) | CUAUUUAUAAAGUGAGUCAGCAGCUUG | 698 |
| 5959 | antisense | | | |
| | strand | | | |
| MAPT- | 27 mer | 5961 (Hs) | AACUAUUGAUAAAGUGAGUCAGCAGCU | 699 |
| 5961 | antisense | | | |
| | strand | | | |
| MAPT- | 27 mer | 5963 (Hs) | GGAACUAUUGAUAAAGUGAGUCAGCAG | 700 |
| 5963 | antisense | | | |
| | strand | | | |
| MAPT- | 27 mer | 5964 (Hs) | UGGAAUUAUUGAUAAAGUGAGUCAGCA | 701 |
| 5964 | antisense | | | |
| | strand | | | |
| MAPT- | 27 mer | 5965 (Hs) | AUGGAACUAUUGAUAAAGUGAGUCAGC | 702 |
| 5965 | antisense | | | |
| | strand | | | |
| MAPT- | 27 mer | 5966-6021 | AAUGGUACUAUUGAUAAAGUGAGUCAG | 703 |
| 5966 | antisense | (Hs-Mf) | | |
| | strand | | | |
| MAPT- | 27 mer | 5967-6022 | AAAUGUAACUAUUGAUAAAGUGAGUCA | 704 |
| 5967 | antisense | (Hs-Mf) | | |
| | strand | | | |
| MAPT- | 27 mer | 5968-6023 | UAAAUUGAACUAUUGAUAAAGUGAGUC | 705 |
| 5968 | antisense | (Hs-Mf) | | |
| | strand | | | |
| MAPT- | 27 mer | 6006-6061 | AUAGCUAACAGGAUACAGUCUCACCAC | 706 |
| 6006 | antisense | (Hs-Mf) | | |
| | strand | | | |
| MAPT- | 27 mer | 6007-6062 | AAUAGUAAACAGGAUACAGUCUCACCA | 707 |
| 6007 | antisense | (Hs-Mf) | | |
| | strand | | | |
| MAPT- | 27 mer | 6008-6063 | CAAUAUCAAACAGGAUACAGUCUCACC | 708 |
| 6008 | antisense | (Hs-Mf) | | |
| | strand | | | |
| MAPT- | 27 mer | 6009-6064 | GCAAUUGCAAACAGGAUACAGUCUCAC | 709 |
| 6009 | antisense | (Hs-Mf) | | |
| | strand | | | |
| MAPT- | 27 mer | 6010-6065 | AGCAAUAGCAAACAGGAUACAGUCUCA | 710 |
| 6010 | antisense | (Hs-Mf) | | |
| | strand | | | |
| MAPT- | 27 mer | 6011-6066 | AAGCAUUAGCAAACAGGAUACAGUCUC | 711 |
| 6011 | antisense | (Hs-Mf) | | |
| | strand | | | |
| MAPT- | 27 mer | 6012-6067 | CAAGCUAUAGCAAACAGGAUACAGUCU | 712 |
| 6012 | antisense | (Hs-Mf) | | |
| | strand | | | |
| MAPT- | 27 mer | 6013-6068 | ACAAGUAAUAGCAAACAGGAUACAGUC | 713 |
| 6013 | antisense | (Hs-Mf) | | |
| | strand | | | |
| MAPT- | 27 mer | 6014-6069 | AACAAUCAAUAGCAAACAGGAUACAGU | 714 |
| 6014 | antisense | (Hs-Mf) | | |
| | strand | | | |
| MAPT- | 27 mer | 6015-6070 | CAACAUGCAAUAGCAAACAGGAUACAG | 715 |
| 6015 | antisense | (Hs-Mf) | | |
| | strand | | | |
| MAPT- | 27 mer | 6017-6072 | CACAAUAAGCAAUAGCAAACAGGAUAC | 716 |
| 6017 | antisense | (Hs-Mf) | | |
| | strand | | | |
| MAPT- | 27 mer | 6119-6174 | GAAAUUAUGAAAAGGGUUACGAGGCAG | 717 |
| 6119 | antisense | (Hs-Mf) | | |
| | strand | | | |
| MAPT- | 27 mer | 6628-6689 | UAGUCUUGCUCAACAUGGCAAACUCAU | 718 |
| 6628 | antisense | (Hs-Mf) | | |
| | strand | | | |
| MAPT- | 27 mer | 6629-6690 | AUAGUUCUGCUCAACAUGGCAAACUCA | 719 |
| 6629 | antisense | (Hs-Mf) | | |
| | strand | | | |
| MAPT- | 27 mer | 6631-6692 | AAAUAUUCCUGCUCAACAUGGCAAACU | 720 |
| 6631 | antisense | (Hs-Mf) | | |
| | strand | | | |
| MAPT- | 27 mer | 6672-6733 | CUCAGUAUUACCGAAGAAAUCAUGGGA | 721 |
| 6672 | antisense | (Hs-Mf) | | |
| | strand | | | |
| MAPT- | 27 mer | 6731 (Hs) | AUAUAUACAUUCACAGACAGAAAGCUA | 722 |
| 6731 | antisense | | | |
| | strand | | | |
| MAPT- | 27 mer | 6732 (Hs) | UAUAUUGACAUUCACAGACAGAAAGCU | 723 |
| 6732 | antisense | | | |
| | strand | | | |
| MAPT- | 27 mer | 6738-6799 | AUACAUUAUAUAGACAUUCACAGACAG | 724 |
| 6738 | antisense | (Hs-Mf) | | |
| | strand | | | |
| MAPT- | 27 mer | 6739-6800 | AAUACUCUAUAUAGACAUUCACAGACA | 725 |
| 6739 | antisense | (Hs-Mf) | | |
| | strand | | | |
| MAPT- | 27 mer | 6740-6801 | CAAUAUACUAUAUAGACAUUCACAGAC | 726 |
| 6740 | antisense | (Hs-Mf) | | |
| | strand | | | |
| MAPT- | 27 mer | 6741-6802 | ACAAUUCACUAUAUAGACAUUCACAGA | 727 |
| 6741 | antisense | (Hs-Mf) | | |
| | strand | | | |
| MAPT- | 27 mer | 6742-6803 | CACAAUACACUAUAUAGACAUUCACAG | 728 |
| 6742 | antisense | (Hs-Mf) | | |
| | strand | | | |
| MAPT- | 27 mer | 6743-6804 | ACACAUUACACUAUAUAGACAUUCACA | 729 |
| 6743 | antisense | (Hs-Mf) | | |
| | strand | | | |
| MAPT- | 27 mer | 6745-6806 | ACACAUAAUACACUAUAUAGACAUUCA | 730 |
| 6745 | antisense | (Hs-Mf) | | |
| | strand | | | |
| MAPT- | 27 mer | 6748-6809 | AAAACUCACAAUACACUAUAUAGACAU | 731 |
| 6748 | antisense | (Hs-Mf) | | |
| | strand | | | |
| MAPT- | 27 mer | 6749-6810 | UAAAAUACACAAUACACUAUAUAGACA | 732 |
| 6749 | antisense | (Hs-Mf) | | |
| | strand | | | |
| MAPT- | 27 mer | 6750-6811 | UUAAAUCACACAAUACACUAUAUAGAC | 733 |
| 6750 | antisense | (Hs-Mf) | | |
| | strand | | | |
| MAPT- | 27 mer | 6751-6812 | GUUAAUACACACAAUACACUAUAUAGA | 734 |
| 6751 | antisense | (Hs-Mf) | | |
| | strand | | | |
| MAPT- | 27 mer | 6752-6813 | UGUUAUAACACACAAUACACUAUAUAG | 735 |
| 6752 | antisense | (Hs-Mf) | | |
| | strand | | | |
| MAPT- | 27 mer | 6753-6814 | UUGUUUAAACACACAAUACACUAUAUA | 736 |
| 6753 | antisense | (Hs-Mf) | | |
| | strand | | | |
| MAPT- | 27 mer | 6754-6815 | UUUGUUAAAACACACAAUACACUAUAU | 737 |
| 6754 | antisense | (Hs-Mf) | | |
| | strand | | | |
| MAPT- | 27 mer | 6755-6816 | AUUUGUUAAAACACACAAUACACUAUA | 738 |
| 6755 | antisense | (Hs-Mf) | | |
| | strand | | | |
| MAPT- | 27 mer | 6756-6817 | CAUUUUUUAAAACACACAAUACACUAU | 739 |
| 6756 | antisense | (Hs-Mf) | | |
| | strand | | | |
| MAPT- | 27 mer | 6757-6818 | UCAUUUGUUAAAACACACAAUACACUA | 740 |
| 6757 | antisense | (Hs-Mf) | | |
| | strand | | | |
| MAPT- | 27 mer | 6758-6819 | AUCAUUUGUUAAAACACACAAUACACU | 741 |
| 6758 | antisense | (Hs-Mf) | | |
| | strand | | | |
| MAPT- | 27 mer | 6759-6820 | AAUCAUUUGUUAAAACACACAAUACAC | 742 |
| 6759 | antisense | (Hs-Mf) | | |
| | strand | | | |
| MAPT- | 27 mer | 6760-6821 | AAAUCUUUUGUUAAAACACACAAUACA | 743 |
| 6760 | antisense | (Hs-Mf) | | |
| | strand | | | |
| MAPT- | 27 mer | 6761-6822 | UAAAUUAUUUGUUAAAACACACAAUAC | 744 |
| 6761 | antisense | (Hs-Mf) | | |
| | strand | | | |
| MAPT- | 27 mer | 6762-6823 | GUAAAUCAUUUGUUAAAACACACAAUA | 745 |
| 6762 | antisense | (Hs-Mf) | | |
| | strand | | | |
| MAPT- | 27 mer | 6763-6824 | UGUAAUUCAUUUGUUAAAACACACAAU | 746 |
| 6763 | antisense | (Hs-Mf) | | |
| | strand | | | |
| MAPT- | 27 mer | 6764-6825 | GUGUAUAUCAUUUGUUAAAACACACAA | 747 |
| 6764 | antisense | (Hs-Mf) | | |
| | strand | | | |
| MAPT- | 27 mer | 6765-6826 | AGUGUUAAUCAUUUGUUAAAACACACA | 748 |
| 6765 | antisense | (Hs-Mf) | | |
| | strand | | | |
| MAPT- | 27 mer | 6766-6827 | CAGUGUAAAUCAUUUGUUAAAACACAC | 749 |
| 6766 | antisense | (Hs-Mf) | | |
| | strand | | | |
| MAPT- | 27 mer | 6767-6828 | UCAGUUUAAAUCAUUUGUUAAAACACA | 750 |
| 6767 | antisense | (Hs-Mf) | | |
| | strand | | | |
| MAPT- | 27 mer | 6768-6829 | GUCAGUGUAAAUCAUUUGUUAAAACAC | 751 |
| 6768 | antisense | (Hs-Mf) | | |
| | strand | | | |
| MAPT- | 27 mer | 6769-6830 | AGUCAUUGUAAAUCAUUUGUUAAAACA | 752 |
| 6769 | antisense | (Hs-Mf) | | |
| | strand | | | |
| MAPT- | 27 mer | 6772-6833 | AACAGUCAGUGUAAAUCAUUUGUUAAA | 753 |
| 6772 | antisense | (Hs-Mf) | | |
| | strand | | | |
| MAPT- | 27 mer | 6773-6834 | CAACAUUCAGUGUAAAUCAUUUGUUAA | 754 |
| 6773 | antisense | (Hs-Mf) | | |
| | strand | | | |
| MAPT- | 27 mer | 6774-6835 | GCAACUGUCAGUGUAAAUCAUUUGUUA | 755 |
| 6774 | antisense | (Hs-Mf) | | |
| | strand | | | |
| MAPT- | 27 mer | 6775-6836 | AGCAAUAGUCAGUGUAAAUCAUUUGUU | 756 |
| 6775 | antisense | (Hs-Mf) | | |
| | strand | | | |
| MAPT- | 27 mer | 6777-6838 | ACAGCUACAGUCAGUGUAAAUCAUUUG | 757 |
| 6777 | antisense | (Hs-Mf) | | |
| | strand | | | |
| MAPT- | 27 mer | 6778-6839 | UACAGUAACAGUCAGUGUAAAUCAUUU | 758 |
| 6778 | antisense | (Hs-Mf) | | |
| | strand | | | |
| MAPT- | 27 mer | 6779-6840 | UUACAUCAACAGUCAGUGUAAAUCAUU | 759 |
| 6779 | antisense | (Hs-Mf) | | |
| | strand | | | |
| MAPT- | 27 mer | 6780-6841 | UUUACUGCAACAGUCAGUGUAAAUCAU | 760 |
| 6780 | antisense | (Hs-Mf) | | |
| | strand | | | |
| MAPT- | 27 mer | 6781 (Hs) | UUUUAUAGCAACAGUCAGUGUAAAUCA | 761 |
| 6781 | antisense | | | |
| | strand | | | |
| MAPT- | 27 mer | 6789 (Hs) | AAAUUUACUUUUACAGCAACAGUCAGU | 762 |
| 6789 | antisense | | | |
| | strand | | | |
| MAPT- | 27 mer | 6792 (Hs) | UCCAAUUUCACUUUUACAGCAACAGUC | 763 |
| 6792 | antisense | | | |
| | strand | | | |
| MAPT- | 27 mer | 6793 (Hs) | UUCCAUAUUCACUUUUACAGCAACAGU | 764 |
| 6793 | antisense | | | |
| | strand | | | |
| MAPT- | 27 mer | 6795 (Hs) | AUUUCUAAAUUCACUUUUACAGCAACA | 765 |
| 6795 | antisense | | | |
| | strand | | | |
| MAPT- | 27 mer | 6796 (Hs) | UAUUUUCAAAUUCACUUUUACAGCAAC | 766 |
| 6796 | antisense | | | |
| | strand | | | |
| MAPT- | 27 mer | 6797 (Hs) | UUAUUUCCAAAUUCACUUUUACAGCAA | 767 |
| 6797 | antisense | | | |
| | strand | | | |
| MAPT- | 27 mer | 6798 (Hs) | UUUAUUUCCAAAUUCACUUUUACAGCA | 768 |
| 6798 | antisense | | | |
| | strand | | | |
| MAPT- | Unmodified | 2456-2533 | AAAAAGAUUGAAACCCACAAGCAGCCG | 769 |
| 2456 | 36 mer | (Hs-Mf) | AAAGGCUGC | |
| | sense | | | |
| | strand | | | |
| MAPT- | Unmodified | 2567 (Hs) | CGGCAUCUCAGCAAUGUCUAGCAGCCGA | 770 |
| 2567 | 36 mer | | AAGGCUGC | |
| | sense | | | |
| | strand | | | |
| MAPT- | Unmodified | 2723-2800 | AGAGUGUGGAAAAAAAAAGAGCAGCCG | 771 |
| 2723 | 36 mer | (Hs-Mf) | AAAGGCUGC | |
| | sense | | | |
| | strand | | | |
| MAPT- | Unmodified | 690-455 | AAGACGAAGCUGCUGGUCAAGCAGCCG | 772 |
| 0690 | 36 mer | (Hs-Mf) | AAAGGCUGC | |
| | sense | | | |
| | strand | | | |
| MAPT- | Unmodified | 1494-1571 | AAGACGGGACUGGAAGCGAAGCAGCCG | 773 |
| 1494 | 36 mer | (Hs-Mf) | AAAGGCUGC | |
| | sense | | | |
| | strand | | | |
| MAPT- | Unmodified | 1733 (Hs) | GAUGGUAAAACGAAGAUCGAGCAGCCG | 774 |
| 1733 | 36 mer | | AAAGGCUGC | |
| | sense | | | |
| | strand | | | |
| MAPT- | Unmodified | 2273-2350 | AUAGUCUACAAACCAGUUGAGCAGCCG | 775 |
| 2273 | 36 mer | (Hs-Mf) | AAAGGCUGC | |
| | sense | | | |
| | strand | | | |
| MAPT- | Unmodified | 2274-2351 | UAGUCUACAAACCAGUUGAAGCAGCCG | 776 |
| 2274 | 36 mer | (Hs-Mf) | AAAGGCUGC | |
| | sense | | | |
| | strand | | | |
| MAPT- | Unmodified | 2276-2353 | GUCUACAAACCAGUUGACCAGCAGCCGA | 777 |
| 2276 | 36 mer | (Hs-Mf) | AAGGCUGC | |
| | sense | | | |
| | strand | | | |
| MAPT- | Unmodified | 2301-2378 | AGGUGACCUCCAAGUGUGGAGCAGCCG | 778 |
| 2301 | 36 mer | (Hs-Mf) | AAAGGCUGC | |
| | sense | | | |
| | strand | | | |
| MAPT- | Unmodified | 2347-2424- | AGGAGGUGGCCAGGUGGAAAGCAGCCG | 779 |
| 2347 | 36 mer | 1172 (Hs- | AAAGGCUGC | |
| | sense | Mf-Mm) | | |
| | strand | | | |
| MAPT- | Unmodified | 2357-2434 | CAGGUGGAAGUAAAAUCUGAGCAGCCG | 780 |
| 2357 | 36 mer | (Hs-Mf) | AAAGGCUGC | |
| | sense | | | |
| | strand | | | |
| MAPT- | Unmodified | 2358-2435 | AGGUGGAAGUAAAAUCUGAAGCAGCCG | 781 |
| 2358 | 36 mer | (Hs-Mf) | AAAGGCUGC | |
| | sense | | | |
| | strand | | | |
| MAPT- | Unmodified | 2364-2441 | AAGUAAAAUCUGAGAAGCUAGCAGCCG | 782 |
| 2364 | 36 mer | (Hs-Mf) | AAAGGCUGC | |
| | sense | | | |
| | strand | | | |
| MAPT- | Unmodified | 2378 (Hs) | AAGCUUGACUUCAAGGACAAGCAGCCG | 783 |
| 2378 | 36 mer | | AAAGGCUGC | |
| | sense | | | |
| | strand | | | |
| MAPT- | Unmodified | 2459-2536- | AAGAUUGAAACCCACAAGCAGCAGCCG | 784 |
| 2459 | 36 mer | 1284 (Hs- | AAAGGCUGC | |
| | sense | Mf-Mm) | | |
| | strand | | | |
| MAPT- | Unmodified | 2461-2538- | GAUUGAAACCCACAAGCUGAGCAGCCG | 785 |
| 2461 | 36 mer | 1286 (Hs- | AAAGGCUGC | |
| | sense | Mf-Mm) | | |
| | strand | | | |
| MAPT- | Unmodified | 2460-2537- | AGAUUGAAACCCACAAGCUAGCAGCCG | 786 |
| 2460 | 36 mer | 1285 (Hs- | AAAGGCUGC | |
| | sense | Mf-Mm) | | |
| | strand | | | |
| MAPT- | Unmodified | 1479-1556 | UGGUCAGUAAAAGCAAAGAAGCAGCCG | 787 |
| 1479 | 36 mer | (Hs-Mf) | AAAGGCUGC | |
| | sense | | | |
| | strand | | | |
| MAPT- | Unmodified | 1505-1582 | GGAAGCGAUGACAAAAAAGAGCAGCCG | 788 |
| 1505 | 36 mer | (Hs-Mf) | AAAGGCUGC | |
| | sense | | | |
| | strand | | | |
| MAPT- | Unmodified | 2096-2173 | CCCAUGCCAGACCUGAAGAAGCAGCCGA | 789 |
| 2096 | 36 mer | (Hs-Mf) | AAGGCUGC | |
| | sense | | | |
| | strand | | | |
| MAPT- | Unmodified | 2270-2347 | CAAAUAGUCUACAAACCAGAGCAGCCG | 790 |
| 2270 | 36 mer | (Hs-Mf) | AAAGGCUGC | |
| | sense | | | |
| | strand | | | |
| MAPT- | Unmodified | 2279-2356 | UACAAACCAGUUGACCUGAAGCAGCCG | 791 |
| 2279 | 36 mer | (Hs-Mf) | AAAGGCUGC | |
| | sense | | | |
| | strand | | | |
| MAPT- | Unmodified | 2281-2358 | CAAACCAGUUGACCUGAGCAGCAGCCGA | 792 |
| 2281 | 36 mer | (Hs-Mf) | AAGGCUGC | |
| | sense | | | |
| | strand | | | |
| MAPT- | Unmodified | 2284-2361 | ACCAGUUGACCUGAGCAAGAGCAGCCG | 793 |
| 2284 | 36 mer | (Hs-Mf) | AAAGGCUGC | |
| | sense | | | |
| | strand | | | |
| MAPT- | Unmodified | 2299-2376 | CAAGGUGACCUCCAAGUGUAGCAGCCG | 794 |
| 2299 | 36 mer | (Hs-Mf) | AAAGGCUGC | |
| | sense | | | |
| | strand | | | |
| MAPT- | Unmodified | 2376 (Hs) | AGAAGCUUGACUUCAAGGAAGCAGCCG | 795 |
| 2376 | 36 mer | | AAAGGCUGC | |
| | sense | | | |
| | strand | | | |
| MAPT- | Unmodified | 2379 (Hs) | AGCUUGACUUCAAGGACAGAGCAGCCG | 796 |
| 2379 | 36 mer | | AAAGGCUGC | |
| | sense | | | |
| | strand | | | |
| MAPT- | Unmodified | 2382 (Hs) | UUGACUUCAAGGACAGAGUAGCAGCCG | 797 |
| 2382 | 36 mer | | AAAGGCUGC | |
| | sense | | | |
| | strand | | | |
| MAPT- | Unmodified | 2449-2526 | AGGAAAUAAAAAGAUUGAAAGCAGCCG | 798 |
| 2449 | 36 mer | (Hs-Mf) | AAAGGCUGC | |
| | sense | | | |
| | strand | | | |
| MAPT- | Unmodified | 2450-2527 | GGAAAUAAAAAGAUUGAAAAGCAGCCG | 799 |
| 2450 | 36 mer | (Hs-Mf) | AAAGGCUGC | |
| | sense | | | |
| | strand | | | |
| MAPT- | Unmodified | 2451-2528 | GAAAUAAAAAGAUUGAAACAGCAGCCG | 800 |
| 2451 | 36 mer | (Hs-Mf) | AAAGGCUGC | |
| | sense | | | |
| | strand | | | |
| MAPT- | Unmodified | 2452-2529 | AAAUAAAAAGAUUGAAACCAGCAGCCG | 801 |
| 2452 | 36 mer | (Hs-Mf) | AAAGGCUGC | |
| | sense | | | |
| | strand | | | |
| MAPT- | Unmodified | 2453-2530 | AAUAAAAAGAUUGAAACCCAGCAGCCG | 802 |
| 2453 | 36 mer | (Hs-Mf) | AAAGGCUGC | |
| | sense | | | |
| | strand | | | |
| MAPT- | Unmodified | 2454-2531 | AUAAAAAGAUUGAAACCCAAGCAGCCG | 803 |
| 2454 | 36 mer | (Hs-Mf) | AAAGGCUGC | |
| | sense | | | |
| | strand | | | |
| MAPT- | unmodified | 2456-2533 | UUGUGGGUUUCAAUCUUUUUGG | 804 |
| 2456 | 32 mer | (Hs-Mf) | | |
| | antisense | | | |
| | strand | | | |
| MAPT- | unmodified | 2567 (Hs) | UAGACAUUGCUGAGAUGCCGGG | 805 |
| 2567 | 32 mer | | | |
| | antisense | | | |
| | strand | | | |
| MAPT- | unmodified | 2723-2800 | UCUUUUUUUUUCCACACUCUGG | 806 |
| 2723 | 32 mer | (Hs-Mf) | | |
| | antisense | | | |
| | strand | | | |
| MAPT- | unmodified | 690-455 | UUGACCAGCAGCUUCGUCUUGG | 807 |
| 0690 | 32 mer | (Hs-Mf) | | |
| | antisense | | | |
| | strand | | | |
| MAPT- | unmodified | 1494-1571 | UUCGCUUCCAGUCCCGUCUUGG | 808 |
| 1494 | 32 mer | (Hs-Mf) | | |
| | antisense | | | |
| | strand | | | |
| MAPT- | unmodified | 1733 (Hs) | UCGAUCUUCGUUUUACCAUCGG | 809 |
| 1733 | 32 mer | | | |
| | antisense | | | |
| | strand | | | |
| MAPT- | unmodified | 2273-2350 | UCAACUGGUUUGUAGACUAUGG | 810 |
| 2273 | 32 mer | (Hs-Mf) | | |
| | antisense | | | |
| | strand | | | |
| MAPT- | unmodified | 2274-2351 | UUCAACUGGUUUGUAGACUAGG | 811 |
| 2274 | 32 mer | (Hs-Mf) | | |
| | antisense | | | |
| | strand | | | |
| MAPT- | unmodified | 2276-2353 | UGGUCAACUGGUUUGUAGACGG | 812 |
| 2276 | 32 mer | (Hs-Mf) | | |
| | antisense | | | |
| | strand | | | |
| MAPT- | unmodified | 2301-2378 | UCCACACUUGGAGGUCACCUGG | 813 |
| 2301 | 32 mer | (Hs-Mf) | | |
| | antisense | | | |
| | strand | | | |
| MAPT- | unmodified | 2347-2424- | UUUCCACCUGGCCACCUCCUGG | 814 |
| 2347 | 32 mer | 1172 (Hs- | | |
| | antisense | Mf-Mm) | | |
| | strand | | | |
| MAPT- | unmodified | 2357-2434 | UCAGAUUUUACUUCCACCUGGG | 815 |
| 2357 | 32 mer | (Hs-Mf) | | |
| | antisense | | | |
| | strand | | | |
| MAPT- | unmodified | 2358-2435 | UUCAGAUUUUACUUCCACCUGG | 816 |
| 2358 | 32 mer | (Hs-Mf) | | |
| | antisense | | | |
| | strand | | | |
| MAPT- | unmodified | 2364-2441 | UAGCUUCUCAGAUUUUACUUGG | 817 |
| 2364 | 32 mer | (Hs-Mf) | | |
| | antisense | | | |
| | strand | | | |
| MAPT- | unmodified | 2378 (Hs) | UUGUCCUUGAAGUCAAGCUUGG | 818 |
| 2378 | 32 mer | | | |
| | antisense | | | |
| | strand | | | |
| MAPT- | unmodified | 2459-2536- | UGCUUGUGGGUUUCAAUCUUGG | 819 |
| 2459 | 32 mer | 1284 (Hs- | | |
| | antisense | Mf-Mm) | | |
| | strand | | | |
| MAPT- | unmodified | 2461-2538- | UCAGCUUGUGGGUUUCAAUCGG | 820 |
| 2461 | 32 mer | 1286 (Hs- | | |
| | antisense | Mf-Mm) | | |
| | strand | | | |
| MAPT- | unmodified | 2460-2537- | UAGCUUGUGGGUUUCAAUCUGG | 821 |
| 2460 | 32 mer | 1285 (Hs- | | |
| | antisense | Mf-Mm) | | |
| | strand | | | |
| MAPT- | unmodified | 1479-1556 | UUCUUUGCUUUUACUGACCAGG | 822 |
| 1479 | 32 mer | (Hs-Mf) | | |
| | antisense | | | |
| | strand | | | |
| MAPT- | unmodified | 1505-1582 | UCUUUUUUGUCAUCGCUUCCGG | 823 |
| 1505 | 32 mer | (Hs-Mf) | | |
| | antisense | | | |
| | strand | | | |
| MAPT- | unmodified | 2096-2173 | UUCUUCAGGUCUGGCAUGGGGG | 824 |
| 2096 | 32 mer | (Hs-Mf) | | |
| | antisense | | | |
| | strand | | | |
| MAPT- | unmodified | 2270-2347 | UCUGGUUUGUAGACUAUUUGGG | 825 |
| 2270 | 32 mer | (Hs-Mf) | | |
| | antisense | | | |
| | strand | | | |
| MAPT- | unmodified | 2279-2356 | UUCAGGUCAACUGGUUUGUAGG | 826 |
| 2279 | 32 mer | (Hs-Mf) | | |
| | antisense | | | |
| | strand | | | |
| MAPT- | unmodified | 2281-2358 | UGCUCAGGUCAACUGGUUUGGG | 827 |
| 2281 | 32 mer | (Hs-Mf) | | |
| | antisense | | | |
| | strand | | | |
| MAPT- | unmodified | 2284-2361 | UCUUGCUCAGGUCAACUGGUGG | 828 |
| 2284 | 32 mer | (Hs-Mf) | | |
| | antisense | | | |
| | strand | | | |
| MAPT- | unmodified | 2299-2376 | UACACUUGGAGGUCACCUUGGG | 829 |
| 2299 | 32 mer | (Hs-Mf) | | |
| | antisense | | | |
| | strand | | | |
| MAPT- | unmodified | 2376 (Hs) | UUCCUUGAAGUCAAGCUUCUGG | 830 |
| 2376 | 32 mer | | | |
| | antisense | | | |
| | strand | | | |
| MAPT- | unmodified | 2379 (Hs) | UCUGUCCUUGAAGUCAAGCUGG | 831 |
| 2379 | 32 mer | | | |
| | antisense | | | |
| | strand | | | |
| MAPT- | unmodified | 2382 (Hs) | UACUCUGUCCUUGAAGUCAAGG | 832 |
| 2382 | 32 mer | | | |
| | antisense | | | |
| | strand | | | |
| MAPT- | unmodified | 2449-2526 | UUUCAAUCUUUUUAUUUCCUGG | 833 |
| 2449 | 32 mer | (Hs-Mf) | | |
| | antisense | | | |
| | strand | | | |
| MAPT- | unmodified | 2450-2527 | UUUUCAAUCUUUUUAUUUCCGG | 834 |
| 2450 | 32 mer | (Hs-Mf) | | |
| | antisense | | | |
| | strand | | | |
| MAPT- | unmodified | 2451-2528 | UGUUUCAAUCUUUUUAUUUCGG | 835 |
| 2451 | 32 mer | (Hs-Mf) | | |
| | antisense | | | |
| | strand | | | |
| MAPT- | unmodified | 2452-2529 | UGGUUUCAAUCUUUUUAUUUGG | 836 |
| 2452 | 32 mer | (Hs-Mf) | | |
| | antisense | | | |
| | strand | | | |
| MAPT- | unmodified | 2453-2530 | UGGGUUUCAAUCUUUUUAUUGG | 837 |
| 2453 | 32 mer | (Hs-Mf) | | |
| | antisense | | | |
| | strand | | | |
| MAPT- | unmodified | 2454-2531 | UUGGGUUUCAAUCUUUUUAUGG | 838 |
| 2454 | 32 mer | (Hs-Mf) | | |
| | antisense | | | |
| | strand | | | |
| MAPT- | Modified | 2456-2533 | [mAs][mA][fA][mA][fA][mG][mA][fU][mU][fG] | 839 |
| 2456 | 36 mer | (Hs-Mf) | [mA][fA][fA][mC][fC][mC][fA][mC][mA][mA] | |
| | sense | | [mG][mC][mA][mG][mC][mC][mG][ademA- | |
| | strand | | GalNAc][ademA-GalNAc][ademA- | |
| | | | GalNAc][mG][mG][mC][mU][mG][mC] | |
| MAPT- | Modified | 2567 (Hs) | [mCs][mG][fG][mC][fA][mU][mC][fU][mC][fA] | 840 |
| 2567 | 36 mer | | [mG][fC][fA][mA][fU][mG][fU][mC][mU][mA] | |
| | sense | | [mG][mC][mA][mG][mC][mC][mG][ademA- | |
| | strand | | GalNAc][ademA-GalNAc][ademA- | |
| | | | GalNAc][mG][G][mC][mU][mG][mC] | |
| MAPT- | Modified | 2723-2800 | [mAs][mG][fA][mG][fU][mG][mU][fG][mG][fA] | 841 |
| 2723 | 36 mer | (Hs-Mf) | [mA][fA][fA][mA][fA][mA][fA][mA][mG] | |
| | sense | | [mA][mG][mC][mA][mG][mC][mC][mG][adem | |
| | strand | | A-GalNAc][ademA-GalNAc][ademA- | |
| | | | GalNAc][mG][mG][mC][mU][mG][mC] | |
| MAPT- | Modified | 690-455 | [mAs][mA][fG][mA][fC][mG][mA][fA][mG][fC] | 842 |
| 0690 | 36 mer | (Hs-Mf) | [mU][fG][fC][mU][fG][mG][fU][mC][mA][mA] | |
| | sense | | [mG][mC][mA][mG][mC][mC][mG][ademA- | |
| | strand | | GalNAc][ademA-GalNAc][ademA- | |
| | | | GalNAc][mG][mG][mC][mU][mG][mC] | |
| MAPT- | Modified | 1494-1571 | [mAs][mA][fG][mA][fC][mG][mG][fG][mA][fC] | 843 |
| 1494 | 36 mer | (Hs-Mf) | [mU][fG][fG][mA][fA][mG][fC][mG][mA] | |
| | sense | | [mA][mG][mC][mA][mG][mC][mC][mA-G][ademA- | |
| | strand | | GalNAc][ademA-GalNAc][ademA- | |
| | | | GalNAc][mG][mG][mC][mU][mG][mC] | |
| MAPT- | Modified | 1733 (Hs) | [mGs][mA][fU][mG][fG][mU][mA][fA][mA][fA] | 844 |
| 1733 | 36 mer | | [mC][fG][fA][mA][fG][mA][fU][mC][mG] | |
| | sense | | [mA][mG][mC][mA][mG][mC][mC][mG][ademA- | |
| | strand | | GalNAc][ademA-GalNAc][ademA- | |
| | | | GalNAc][mG][mG][mC][mU][mG][mC] | |
| MAPT- | Modified | 2273-2350 | [mAs][mU][fA][mG][fU][mC][mU][fA][mC][fA] | 845 |
| 2273 | 36 mer | (Hs-Mf) | [mA][fA][fC][mC][fA][mG][fU][mU][mG] | |
| | sense | | [mA][mG][mC][mA][mG][mC][mC][mG][ademA- | |
| | strand | | GalNAc][ademA-GalNAc][ademA- | |
| | | | GalNAc][mG][mG][mC][mU][mG][mC] | |
| MAPT- | Modified | 2274-2351 | [mUs][mA][fG][mU][fC][mU][mA][fC][mA][fA] | 846 |
| 2274 | 36 mer | (Hs-Mf) | [mA][fC][fC][mA][fG][mU][fU][mG][mA] | |
| | sense | | [mA][mG][mC][mA][mG][mC][mC][mG][ademA- | |
| | strand | | GalNAc][ademA-GalNAc][ademA- | |
| | | | GalNAc][mG][mG][mC][mU][mG][mC] | |
| MAPT- | Modified | 2276-2353 | [mGs][mU][fC][mU][fA][mC][mA][fA][mA][fC] | 847 |
| 2276 | 36 mer | (Hs-Mf) | [mC][fA][fG][mU][fU][mG][fA][mC][mC][mA] | |
| | sense | | [mG][mC][mA][mG][mC][mC][mG][ademA- | |
| | strand | | GalNAc][ademA-GalNAc][ademA- | |
| | | | GalNAc][mG][mG][mC][mU][mG][mC] | |
| MAPT- | Modified | 2301-2378 | [mAs][mG][fG][mU][fG][mA][mC][fC][mU][fC] | 848 |
| 2301 | 36 mer | (Hs-Mf) | [mC][fA][fA][mG][fU][mG][fU][mG][mG] | |
| | sense | | [mA][mG][mC][mA][mG][mC][mC][mG][ademA- | |
| | strand | | GalNAc][ademA-GalNAc][ademA- | |
| | | | GalNAc][mG][mG][mC][mU][mG][mC] | |
| MAPT- | Modified | 2347-2424- | [mAs][mG][fG][mA][fG][mG][mU][fG][mG][fC] | 849 |
| 2347 | 36 mer | 1172 (Hs- | [mC][fA][fG][mG][fU][mG][fG][mA][mA] | |
| | sense | Mf-Mm) | [mA][mG][mC][mA][mG][mC][mC][mG][ademA- | |
| | strand | | GalNAc][ademA-GalNAc][ademA- | |
| | | | GalNAc][mG][mG][mC][mU][mG][mC] | |
| MAPT- | Modified | 2357-2434 | [mCs][mA][fG][mG][fU][mG][mG][fA][mA][fG] | 850 |
| 2357 | 36 mer | (Hs-Mf) | [mU][fA][fA][mA][fA][mU][fC][mU][mG] | |
| | sense | | [mA][mG][mC][mA][mG][mC][mC][mG][ademA- | |
| | strand | | GalNAc][ademA-GalNAc][ademA- | |
| | | | GalNAc][mG][mG][mC][mU][mG][mC] | |
| MAPT- | Modified | 2358-2435 | [mAs][mG][fG][mU][fG][mG][mA][fA][mG][fU] | 851 |
| 2358 | 36 mer | (Hs-Mf) | [mA][fA][fA][mA][fU][mC][fU][mG][mA] | |
| | sense | | [mA][mG][mC][mA][mG][mC][mC][mG][ademA- | |
| | strand | | GalNAc][ademA-GalNAc][ademA- | |
| | | | GalNAc][mG][mG][mC][mU][mG][mC] | |
| MAPT- | Modified | 2364-2441 | [mAs][mA][fG][mU][fA][mA][mA][fA][mU][fC] | 852 |
| 2364 | 36 mer | (Hs-Mf) | [mU][fG][fA][mG][fA][mA][fG][mC][mU] | |
| | sense | | [mA][mG][mC][mA][mG][mC][mC][mG][ademA- | |
| | strand | | GalNAc][ademA-GalNAc][ademA- | |
| | | | GalNAc][mG][mG][mC][mU][mG][mC] | |
| MAPT- | Modified | 2378 (Hs) | [mAs][mA][fG][mC][fU][mU][mG][fA][mC][fU] | 853 |
| 2378 | 36 mer | | [mU][fC][fA][mA][fG][mG][fA][mC][mA] | |
| | sense | | [mA][mG][mC][mA][mG][mC][mC][mG][ademA- | |
| | strand | | GalNAc][ademA-GalNAc][ademA- | |
| | | | GalNAc][mG][mG][mC][mU][mG][mC] | |
| MAPT- | Modified | 2459-2536- | [mAs][mA][fG][mA][fU][mU][mG][fA][mA][fA] | 854 |
| 2459 | 36 mer | 1284 (Hs- | [mC][fC][fC][mA][fC][mA][fA][mG][mC][mA] | |
| | sense | Mf-Mm) | [mG][mC][mA][mG][mC][mC][mG][ademA- | |
| | strand | | GalNAc][ademA-GalNAc][ademA- | |
| | | | GalNAc][mG][mG][mC][mU][mG][mC] | |
| MAPT- | Modified | 2461-2538- | [mGs][mA][fU][mU][fG][mA][mA][fA][mC][fC] | 855 |
| 2461 | 36 mer | 1286 (Hs- | [mC][fA][fC][mA][fA][mG][fC][mU][mG][mA] | |
| | sense | Mf-Mm) | [mG][mC][mA][mG][mC][mC][mG][ademA- | |
| | strand | | GalNAc][ademA-GalNAc][ademA- | |
| | | | GalNAc][mG][mG][mC][mU][mG][mC] | |
| MAPT- | Modified | 2460-2537- | [mAs][mG][mA][mU][mU][mG][mA][A][fA][fC] | 856 |
| 2460 | 36 mer | 1285 (Hs- | [fC][mC][mA][mC][mA][mA][mG][mC][mU] | |
| | sense | Mf-Mm) | [mA][mG][mC][mA][mG][mC][mC][mG][ademA- | |
| | strand | | GalNAc][ademA-GalNAc][ademA- | |
| | | | GalNAc][mG][mG][mC][mU][mG][mC] | |
| MAPT- | Modified | 1479-1556 | [mUs][mG][fG][mU][fC][mA][mG][fU][mA][fA] | 857 |
| 1479 | 36 mer | (Hs-Mf) | [mA][fA][fG][mC][fA][mA][fA][mG][mA] | |
| | sense | | [mA][mG][mC][mA][mG][mC][mC][mG][ademA- | |
| | strand | | GalNAc][ademA-GalNAc][ademA- | |
| | | | GalNAc][mG][mG][mC][mU][mG][mC] | |
| MAPT- | Modified | 1505-1582 | [mGs][mG][fA][mA][fG][mC][mG][fA][mU][fG] | 858 |
| 1505 | 36 mer | (Hs-Mf) | [mA][fC][fA][mA][fA][mA][fA][mA][mG] | |
| | sense | | [mA][mG][mC][mA][mG][mC][mC][mG][ademA- | |
| | strand | | GalNAc][ademA-GalNAc][ademA- | |
| | | | GalNAc][mG][mG][mC][mU][mG][mC] | |
| MAPT- | Modified | 2096-2173 | [mCs][mC][fC][mA][fU][mG][mC][fC][mA][fG] | 859 |
| 2096 | 36 mer | (Hs-Mf) | [mA][fC][fC][mU][fG][mA][fA][mG][mA][mA] | |
| | sense | | [mG][mC][mA][mG][mC][mC][mG][ademA- | |
| | strand | | GalNAc][ademA-GalNAc][ademA- | |
| | | | GalNAc][mG][mG][mC][mU][mG][mC] | |
| MAPT- | Modified | 2270-2347 | [mCs][mA][fA][mA][fU][mA][mG][fU][mC][fU] | 860 |
| 2270 | 36 mer | (Hs-Mf) | [mA][fC][fA][mA][fA][mC][fC][mA][mG][mA] | |
| | sense | | [mG][mC][mA][mG][mC][mC][mG][ademA- | |
| | strand | | GalNAc][ademA-GalNAc][ademA- | |
| | | | GalNAc][mG][mG][mC][mU][mG][mC] | |
| MAPT- | Modified | 2279-2356 | [mUs][mA][fC][mA][fA][mA][mC][fC][mA][fG] | 861 |
| 2279 | 36 mer | (Hs-Mf) | [mU][fU][fG][mA][fC][mC][fU][mG][mA] | |
| | sense | | [mA][mG][mC][mA][mG][mC][mC][mG][ademA- | |
| | strand | | GalNAc][ademA-GalNAc][ademA- | |
| | | | GalNAc][mG][mG][mC][mU][mG][mC] | |
| MAPT- | Modified | 2281-2358 | [mCs][mA][fA][mA][fC][mC][mA][fG][mU][fU] | 862 |
| 2281 | 36 mer | (Hs-Mf) | [mG][fA][fC][mC][fU][mG][fA][mG][mC][mA] | |
| | sense | | [mG][mC][mA][mG][mC][mC][mG][ademA- | |
| | strand | | GalNAc][ademA-GalNAc][ademA- | |
| | | | GalNAc][mG][mG][mC][mU][mG][mC] | |
| MAPT- | Modified | 2284-2361 | [mAs][mC][fC][mA][fG][mU][mU][fG][mA][fC] | 863 |
| 2284 | 36 mer | (Hs-Mf) | [mC][fU][fG][mA][fG][mC][fA][mA][mG][mA] | |
| | sense | | [mG][mC][mA][mG][mC][mC][mG][ademA- | |
| | strand | | GalNAc][ademA-GalNAc][ademA- | |
| | | | GalNAc][mG][mG][mC][mU][mG][mC] | |
| MAPT- | Modified | 2299-2376 | [mCs][mA][fA][mG][fG][mU][mG][fA][mC][fC] | 864 |
| 2299 | 36 mer | (Hs-Mf) | [mU][fC][fC][mA][fA][mG][fU][mG][mU][mA] | |
| | sense | | [mG][mC][mA][mG][mC][mC][mG][ademA- | |
| | strand | | GalNAc][ademA-GalNAc][ademA- | |
| | | | GalNAc][mG][mG][mC][mU][mG][mC] | |
| MAPT- | Modified | 2376 (Hs) | [mAs][mG][fA][mA][fG][mC][mU][fU][mG][fA] | 865 |
| 2376 | 36 mer | | [mC][fU][fU][mC][fA][mA][fG][mG][mA] | |
| | sense | | [mA][mG][mC][mA][mG][mC][mC][mG][ademA- | |
| | strand | | GalNAc][ademA-GalNAc][ademA- | |
| | | | GalNAc][mG][mG][mC][mU][mG][mC] | |
| MAPT- | Modified | 2379 (Hs) | [mAs][mG][fC][mU][fU][mG][mA][fC][mU][fU] | 866 |
| 2379 | 36 mer | | [mC][fA][fA][mG][fG][mA][fC][mA][mG] | |
| | sense | | [mA][mG][mC][mA][mG][mC][mC][mG][ademA- | |
| | strand | | GalNAc][ademA-GalNAc][ademA- | |
| | | | GalNAc][mG][mG][mC][mU][mG][mC] | |
| MAPT- | Modified | 2382 (Hs) | [mUs][mU][fG][mA][fC][mU][mU][fC][mA][fA] | 867 |
| 2382 | 36 mer | | [mG][fG][fA][mC][fA][mG][fA][mG][mU] | |
| | sense | | [mA][mG][mC][mA][mG][mC][mC][mG][ademA- | |
| | strand | | GalNAc][ademA-GalNAc][ademA- | |
| | | | GalNAc][mG][mG][mC][mU][mG][mC] | |
| MAPT- | Modified | 2449-2526 | [mAs][mG][fG][mA][fA][mA][mU][fA][mA][fA] | 868 |
| 2449 | 36 mer | (Hs-Mf) | [mA][fA][fG][mA][fU][mU][fG][mA][mA] | |
| | sense | | [mA][mG][mC][mA][mG][mC][mC][mG][ademA- | |
| | strand | | GalNAc][ademA-GalNAc][ademA- | |
| | | | GalNAc][mG][mG][mC][mU][mG][mC] | |
| MAPT- | Modified | 2450-2527 | [mGs][mG][fA][mA][fA][mU][mA][fA][mA][fA] | 869 |
| 2450 | 36 mer | (Hs-Mf) | [mA][fG][fA][mU][fU][mG][fA][mA][mA] | |
| | sense | | [mA][mG][mC][mA][mG][mC][mC][mG][ademA- | |
| | strand | | GalNAc][ademA-GalNAc][ademA- | |
| | | | GalNAc][mG][mG][mC][mU][mG][mC] | |
| MAPT- | Modified | 2451-2528 | [mGs][mA][fA][mA][fU][mA][mA][fA][mA][fA] | 870 |
| 2451 | 36 mer | (Hs-Mf) | [mG][fA][fU][mU][fG][mA][fA][mA][mC] | |
| | sense | | [mA][mG][mC][mA][mG][mC][mC][mG][ademA- | |
| | strand | | GalNAc][ademA-GalNAc][ademA- | |
| | | | GalNAc][mG][mG][mC][mU][mG][mC] | |
| MAPT- | Modified | 2452-2529 | [mAs][mA][fA][mU][fA][mA][mA][fA][mA][fG] | 871 |
| 2452 | 36 mer | (Hs-Mf) | [mA][fU][fU][mG][fA][mA][fA][mC][mC] | |
| | sense | | [mA][mG][mC][mA][mG][mC][mC][mG][ademA- | |
| | strand | | GalNAc][ademA-GalNAc][ademA- | |
| | | | GalNAc][mG][mG][mC][mU][mG][mC] | |
| MAPT- | Modified | 2453-2530 | [mAs][mA][fU][mA][fA][mA][mA][fA][mG][fA] | 872 |
| 2453 | 36 mer | (Hs-Mf) | [mU][fU][fG][mA][fA][mA][fC][mC][mC][mA] | |
| | sense | | [mG][mC][mA][mG][mC][mC][mG][ademA- | |
| | strand | | GalNAc][ademA-GalNAc][ademA- | |
| | | | GalNAc][mG][mG][mC][mU][mG][mC] | |
| MAPT- | Modified | 2454-2531 | [mAs][mU][fA][mA][fA][mA][mA][fG][mA][fU] | 873 |
| 2454 | 36 mer | (Hs-Mf) | [mU][fG][fA][mA][fA][mC][fC][mC][mA][mA] | |
| | sense | | [mG][mC][mA][mG][mC][mC][mG][ademA- | |
| | strand | | GalNAc][ademA-GalNAc][ademA- | |
| | | | GalNAc][mG][mG][mC][mU][mG][mC] | |
| MAPT- | Modified | 2456-2533 | [MePhosphonate-4O- | 874 |
| 2456 | 22 mer | (Hs-Mf) | mUs][fUs][fG][fU][fG][mG][fG][mU][mU][fU] | |
| | antisense | | [mC][mA][mA][fU][mC][fU][mU][mU][fU] | |
| | strand | | [mUs][mGs][mG] | |
| MAPT- | Modified | 2567 (Hs) | [MePhosphonate-4O- | 875 |
| 2567 | 22 mer | | mUs][fAs][fG][fA][fC][mA][fU][mU][mG][fC] | |
| | antisense | | [mU][mG][mA][fG][mA][fU][mG][mC][fC][mGs] | |
| | strand | | [mGs][mG] | |
| MAPT- | Modified | 2723-2800 | [MePhosphonate-4O- | 876 |
| 2723 | 22 mer | (Hs-Mf) | mUs][fCs][fU][fU][fU][mU][fU][mU][mU][fU] | |
| | antisense | | [mU][mC][mC][fA][mC][fA][mC][mU][fC][mUs] | |
| | strand | | [mGs][mG] | |
| MAPT- | Modified | 690-455 | [MePhosphonate-4O- | 877 |
| 0690 | 22 mer | (Hs-Mf) | mUs][fUs][fG][fA][fC][mC][fA][mG][mC][fA] | |
| | antisense | | [mG][mC][mU][fU][mC][fG][mU][mC][fU][mUs] | |
| | strand | | [mGs][mG] | |
| MAPT- | Modified | 1494-1571 | [MePhosphonate-4O- | 878 |
| 1494 | 22 mer | (Hs-Mf) | mUs][fUs][fC][fG][fC][mU][fU][mC][mC][fA] | |
| | antisense | | [mG][mU][mC][fC][mC][fG][mU][mC][fU][mUs] | |
| | strand | | [mGs][mG] | |
| MAPT- | Modified | 1733 (Hs) | [MePhosphonate-4O- | 879 |
| 1733 | 22 mer | | mUs][fCs][fG][fA][fU][mC][fU][mU][mC][fG] | |
| | antisense | | [mU][mU][mU][fU][mA][fC][mC][mA][fU][mCs] | |
| | strand | | [mGs][mG] | |
| MAPT- | Modified | 2273-2350 | [MePhosphonate-4O- | 880 |
| 2273 | 22 mer | (Hs-Mf) | mUs][fCs][fA][fA][fC][mU][fG][mG][mU][fU] | |
| | antisense | | [mU][mG][mU][fA][mG][fA][mC][mU][fA][mUs] | |
| | strand | | [mGs][mG] | |
| MAPT- | Modified | 2274-2351 | [MePhosphonate-4O- | 881 |
| 2274 | 22 mer | (Hs-Mf) | mUs][fUs][fC][fA][fA][mC][fU][mG][mG][fU] | |
| | antisense | | [mU][mU][mG][fU][mA][fG][mA][mC][fU][mAs] | |
| | strand | | [mGs][mG] | |
| MAPT- | Modified | 2276-2353 | [MePhosphonate-4O- | 882 |
| 2276 | 22 mer | (Hs-Mf) | mUs][fGs][fG][fU][fC][mA][fA][mC][mU][fG] | |
| | antisense | | [mG][mU][mU][fU][mG][fU][mA][mG][fA][mCs] | |
| | strand | | [mGs][mG] | |
| MAPT- | Modified | 2301-2378 | [MePhosphonate-4O- | 883 |
| 2301 | 22 mer | (Hs-Mf) | mUs][fCs][fC][fA][fC][mA][fC][mU][mU][fG] | |
| | antisense | | [mG][mA][mG][fG][mU][fC][mA][mC][fC][mUs] | |
| | strand | | [mGs][mG] | |
| MAPT- | Modified | 2347-2424- | [MePhosphonate-4O- | 884 |
| 2347 | 22 mer | 1172 (Hs- | mUs][fUs][fU][fC][fC][mA][fC][mC][mU][fG] | |
| | antisense | Mf-Mm) | [mG][mC][mC][fA][mC][fC][mU][mC][fC][mUs] | |
| | strand | | [mGs][mG] | |
| MAPT- | Modified | 2357-2434 | [MePhosphonate-4O- | 885 |
| 2357 | 22 mer | (Hs-Mf) | mUs][fCs][fA][fG][fA][mU][fU][mU][mU][fA] | |
| | antisense | | [mC][mU][mU][fC][mC][fA][mC][mC][fU][mGs] | |
| | strand | | [mGs][mG] | |
| MAPT- | Modified | 2358-2435 | [MePhosphonate-4O- | 886 |
| 2358 | 22 mer | (Hs-Mf) | mUs][fUs][fC][fA][fG][mA][fU][mU][mU][fU] | |
| | antisense | | [mA][mC][mU][fU][mC][fC][mA][mC][fC][mUs] | |
| | strand | | [mGs][mG] | |
| MAPT- | Modified | 2364-2441 | [MePhosphonate-4O- | 887 |
| 2364 | 22 mer | (Hs-Mf) | mUs][fAs][fG][fC][fU][mU][fC][mU][mC][fA] | |
| | antisense | | [mG][mA][mU][fU][mU][fU][mA][mC][fU][mUs] | |
| | strand | | [mGs][mG] | |
| MAPT- | Modified | 2378 (Hs) | [MePhosphonate-4O- | 888 |
| 2378 | 22 mer | | mUs][fUs][fG][fU][fC][mC][fU][mU][mG][fA] | |
| | antisense | | [mA][mG][mU][fC][mA][fA][mG][mC][fU][mUs] | |
| | strand | | [mGs][mG] | |
| MAPT- | Modified | 2459-2536- | [MePhosphonate-4O- | 889 |
| 2459 | 22 mer | 1284 (Hs- | mUs][fGs][fC][fU][fU][mG][fU][mG][mG][fG] | |
| | antisense | Mf-Mm) | [mU][mU][mU][fC][mA][fA][mU][mC][fU][mUs] | |
| | strand | | [mGs][mG] | |
| MAPT- | Modified | 2461-2538- | [MePhosphonate-4O- | 890 |
| 2461 | 22 mer | 1286 (Hs- | mUs][fCs][fA][fG][fC][mU][fU][mG][mU][fG] | |
| | antisense | Mf-Mm) | [mG][mG][mU][fU][mU][fC][mA][mA][fU][mCs] | |
| | strand | | [mGs][mG] | |
| MAPT- | Modified | 2460-2537- | [MePhosphonate-4O- | 891 |
| 2460 | 22 mer | 1285 (Hs- | mUs][fAs][fGs][fC][fU][mU][fG][mU][mG][fG] | |
| | antisense | Mf-Mm) | [mG][mU][mU][fU][mC][mA][mA][mU][mC] | |
| | strand | | [mUs][mGs][mG] | |
| MAPT- | Modified | 1479-1556 | [MePhosphonate-4O- | 892 |
| 1479 | 22 mer | (Hs-Mf) | mUs][fUs][fC][fU][fU][mU][fG][mC][mU][fU] | |
| | antisense | | [mU][mU][mA][fC][mU][fG][mA][mC][fC][mAs] | |
| | strand | | [mGs][mG] | |
| MAPT- | Modified | 1505-1582 | [MePhosphonate-4O- | 893 |
| 1505 | 22 mer | (Hs-Mf) | mUs][fCs][fU][fU][fU][mU][fU][mU][mG][fU] | |
| | antisense | | [mC][mA][mU][fC][mG][fC][mU][mU][fC][mCs] | |
| | strand | | [mGs][mG] | |
| MAPT- | Modified | 2096-2173 | [MePhosphonate-4O- | 894 |
| 2096 | 22 mer | (Hs-Mf) | mUs][fUs][fC][fU][fU][mC][fA][mG][mG][fU] | |
| | antisense | | [mC][mU][mG][fG][mC][fA][mU][mG][fG][mGs] | |
| | strand | | [mGs][mG] | |
| MAPT- | Modified | 2270-2347 | [MePhosphonate-4O- | 895 |
| 2270 | 22 mer | (Hs-Mf) | mUs][fCs][fU][fG][fG][mU][fU][mU][mG][fU] | |
| | antisense | | [mA][mG][mA][fC][mU][fA][mU][mU][fU][mGs] | |
| | strand | | [mGs][mG] | |
| MAPT- | Modified | 2279-2356 | [MePhosphonate-4O- | 896 |
| 2279 | 22 mer | (Hs-Mf) | mUs][fUs][fC][fA][fG][mG][fU][mC][mA][fA] | |
| | antisense | | [mC][mU][mG][fG][mU][fU][mU][mG][fU][mAs] | |
| | strand | | [mGs][mG] | |
| MAPT- | Modified | 2281-2358 | [MePhosphonate-4O- | 897 |
| 2281 | 22 mer | (Hs-Mf) | mUs][fGs][fC][fU][fC][mA][fG][mG][mU][fC] | |
| | antisense | | [mA][mA][mC][fU][mG][fG][mU][mU][fU][mGs] | |
| | strand | | [mGs][mG] | |
| MAPT- | Modified | 2284-2361 | [MePhosphonate-4O- | 898 |
| 2284 | 22 mer | (Hs-Mf) | mUs][fCs][fU][fU][fG][mC][fU][mC][mA][G] | |
| | antisense | | [mG][mU][mC][fA][mA][fC][mU][mG][fG][mUs] | |
| | strand | | [mGs][mG] | |
| MAPT- | Modified | 2299-2376 | [MePhosphonate-4O- | 899 |
| 2299 | 22 mer | (Hs-Mf) | mUs][fAs][fC][fA][fC][mU][fU][mG][mG][fA] | |
| | antisense | | [mG][mG][mU][fC][mA][fC][mC][mU][fU][mGs] | |
| | strand | | [mGs][mG] | |
| MAPT- | Modified | 2376 (Hs) | [MePhosphonate-4O- | 900 |
| 2376 | 22 mer | | mUs][fUs][fC][fC][fU][mU][fG][mA][mA][fG] | |
| | antisense | | [mU][mC][mA][fA][mG][fC][mU][mU][fC][mUs] | |
| | strand | | [mGs][mG] | |
| MAPT- | Modified | 2379 (Hs) | [MePhosphonate-4O- | 901 |
| 2379 | 22 mer | | mUs][fCs][fU][fG][fU][mC][fC][mU][mU][fG] | |
| | antisense | | [mA][mA][mG][fU][mC][fA][mA][mG][fC][mUs] | |
| | strand | | [mGs][mG] | |
| MAPT- | Modified | 2382 (Hs) | [MePhosphonate-4O- | 902 |
| 2382 | 22 mer | | mUs][fAs][fC][fU][fC][mU][fG][mU][mC][fC] | |
| | antisense | | [mU][mU][mG][fA][mA][fG][mU][mC][fA][mAs] | |
| | strand | | [mGs][mG] | |
| MAPT- | Modified | 2449-2526 | [MePhosphonate-4O- | 903 |
| 2449 | 22 mer | (Hs-Mf) | mUs][fUs][fU][fC][fA][mA][fU][mC][mU][fU] | |
| | antisense | | [mU][mU][mU][fA][mU][fU][mU][mC][fC][mUs] | |
| | strand | | [mGs][mG] | |
| MAPT- | Modified | 2450-2527 | [MePhosphonate-4O- | 904 |
| 2450 | 22 mer | (Hs-Mf) | mUs][fUs][fU][fU][fC][mA][fA][mU][mC][fU] | |
| | antisense | | [mU][mU][mU][fU][mA][fU][mU][mU][fC][mCs] | |
| | strand | | [mGs][mG] | |
| MAPT- | Modified | 2451-2528 | [MePhosphonate-4O- | 905 |
| 2451 | 22 mer | (Hs-Mf) | mUs][fGs][fU][fU][fU][mC][fA][mA][mU][fC] | |
| | antisense | | [mU][mU][mU][fU][mU][fA][mU][mU][fU][mCs] | |
| | strand | | [mGs][mG] | |
| MAPT- | Modified | 2452-2529 | [MePhosphonate-4O- | 906 |
| 2452 | 22 mer | (Hs-Mf) | mUs][fGs][fG][fU][fU][mU][fC][mA][mA][fU] | |
| | antisense | | [mC][mU][mU][fU][mU][fU][mA][mU][fU][mUs] | |
| | strand | | [mGs][mG] | |
| MAPT- | Modified | 2453-2530 | [MePhosphonate-4O- | 907 |
| 2453 | 22 mer | (Hs-Mf) | mUs][fGs][fG][fG][fU][mU][fU][mC][mA][fA] | |
| | antisense | | [mU][mC][mU][fU][mU][fU][mU][mA][fU][mUs] | |
| | strand | | [mGs][mG] | |
| MAPT- | Modified | 2454-2531 | [MePhosphonate-4O- | 908 |
| 2454 | 22 mer | (Hs-Mf) | mUs][fUs][fG][fG][fG][mU][fU][mU][mC][fA] | |
| | antisense | | [mA][mU][mC][fU][mU][fU][mU][mU][fA][mUs] | |
| | strand | | [mGs][mG] | |
| Human | NM_001123066.3 | N/A | ATGGCTGAGCCCCGCCAGGAGTTCGAAG | 909 |
| MAPT | | | TGATGGAAGATCACGCTGGGACGTACGG | |
| RefSeq | | | GTTGGGGGACAGGAAAGATCAGGGGGGC | |
| | | | TACACCATGCACCAAGACCAAGAGGGTG | |
| | | | ACACGGACGCTGGCCTGAAAGAATCTCC | |
| | | | CCTGCAGACCCCCACTGAGGACGGATCT | |
| | | | GAGGAACCGGGCTCTGAAACCTCTGATG | |
| | | | CTAAGAGCACTCCAACAGCGGAAGATGT | |
| | | | GACAGCACCCTTAGTGGATGAGGGAGCT | |
| | | | CCCGGCAAGCAGGCTGCCGCGCAGCCCC | |
| | | | ACACGGAGATCCCAGAAGGAACCACAGC | |
| | | | TGAAGAAGCAGGCATTGGAGACACCCCC | |
| | | | AGCCTGGAAGACGAAGCTGCTGGTCACG | |
| | | | TGACCCAAGAGCCTGAAAGTGGTAAGGT | |
| | | | GGTCCAGGAAGGCTTCCTCCGAGAGCCA | |
| | | | GGCCCCCCAGGTCTGAGCCACCAGCTCA | |
| | | | TGTCCGGCATGCCTGGGGCTCCCCTCCTG | |
| | | | CCTGAGGGCCCCAGAGAGGCCACACGCC | |
| | | | AACCTTCGGGGACAGGACCTGAGGACAC | |
| | | | AGAGGGCGGCCGCCACGCCCCTGAGCTG | |
| | | | CTCAAGCACCAGCTTCTAGGAGACCTGC | |
| | | | ACCAGGAGGGGCCGCCGCTGAAGGGGGC | |
| | | | AGGGGGCAAAGAGAGGCCGGGGAGCAA | |
| | | | GGAGGAGGTGGATGAAGACCGCGACGTC | |
| | | | GATGAGTCCTCCCCCCAAGACTCCCCTCC | |
| | | | CTCCAAGGCCTCCCCAGCCCAAGATGGG | |
| | | | CGGCCTCCCCAGACAGCCGCCAGAGAAG | |
| | | | CCACCAGCATCCCAGGCTTCCCAGCGGA | |
| | | | GGGTGCCATCCCCCTCCCTGTGGATTTCC | |
| | | | TCTCCAAAGTTTCCACAGAGATCCCAGCC | |
| | | | TCAGAGCCCGACGGGCCCAGTGTAGGGC | |
| | | | GGGCCAAAGGGCAGGATGCCCCCCTGGA | |
| | | | GTTCACGTTTCACGTGGAAATCACACCCA | |
| | | | ACGTGCAGAAGGAGCAGGCGCACTCGGA | |
| | | | GGAGCATTTGGGAAGGGCTGCATTTCCA | |
| | | | GGGGCCCCTGGAGAGGGGCCAGAGGCCC | |
| | | | GGGGCCCCTCTTTGGGAGAGGACACAAA | |
| | | | AGAGGCTGACCTTCCAGAGCCCTCTGAA | |
| | | | AAGCAGCCTGCTGCTGCTCCGCGGGGGA | |
| | | | AGCCCGTCAGCCGGGTCCCTCAACTCAA | |
| | | | AGCTCGCATGGTCAGTAAAAGCAAAGAC | |
| | | | GGGACTGGAAGCGATGACAAAAAAGCCA | |
| | | | AGACATCCACACGTTCCTCTGCTAAAACC | |
| | | | TTGAAAAATAGGCCTTGCCTTAGCCCCAA | |
| | | | ACACCCCACTCCTGGTAGCTCAGACCCTC | |
| | | | TGATCCAACCCTCCAGCCCTGCTGTGTGC | |
| | | | CCAGAGCCACCTTCCTCTCCTAAATACGT | |
| | | | CTCTTCTGTCACTTCCCGAACTGGCAGTT | |
| | | | CTGGAGCAAAGGAGATGAAACTCAAGGG | |
| | | | GGCTGATGGTAAAACGAAGATCGCCACA | |
| | | | CCGCGGGGAGCAGCCCCTCCAGGCCAGA | |
| | | | AGGGCCAGGCCAACGCCACCAGGATTCC | |
| | | | AGCAAAAACCCCGCCCGCTCCAAAGACA | |
| | | | CCACCCAGCTCTGCGACTAAGCAAGTCC | |
| | | | AGAGAAGACCACCCCCTGCAGGGCCCAG | |
| | | | ATCTGAGAGAGGTGAACCTCCAAAATCA | |
| | | | GGGGATCGCAGCGGCTACAGCAGCCCCG | |
| | | | GCTCCCCAGGCACTCCCGGCAGCCGCTC | |
| | | | CCGCACCCCGTCCCTTCCAACCCCACCCA | |
| | | | CCCGGGAGCCCAAGAAGGTGGCAGTGGT | |
| | | | CCGTACTCCACCCAAGTCGCCGTCTTCCG | |
| | | | CCAAGAGCCGCCTGCAGACAGCCCCCGT | |
| | | | GCCCATGCCAGACCTGAAGAATGTCAAG | |
| | | | TCCAAGATCGGCTCCACTGAGAACCTGA | |
| | | | AGCACCAGCCGGGAGGCGGGAAGGTGCA | |
| | | | GATAATTAATAAGAAGCTGGATCTTAGC | |
| | | | AACGTCCAGTCCAAGTGTGGCTCAAAGG | |
| | | | ATAATATCAAACACGTCCCGGGAGGCGG | |
| | | | CAGTGTGCAAATAGTCTACAAACCAGTT | |
| | | | GACCTGAGCAAGGTGACCTCCAAGTGTG | |
| | | | GCTCATTAGGCAACATCCATCATAAACC | |
| | | | AGGAGGTGGCCAGGTGGAAGTAAAATCT | |
| | | | GAGAAGCTTGACTTCAAGGACAGAGTCC | |
| | | | AGTCGAAGATTGGGTCCCTGGACAATAT | |
| | | | CACCCACGTCCCTGGCGGAGGAAATAAA | |
| | | | AAGATTGAAACCCACAAGCTGACCTTCC | |
| | | | GCGAGAACGCCAAAGCCAAGACAGACCA | |
| | | | CGGGGCGGAGATCGTGTACAAGTCGCCA | |
| | | | GTGGTGTCTGGGGACACGTCTCCACGGC | |
| | | | ATCTCAGCAATGTCTCCTCCACCGGCAGC | |
| | | | ATCGACATGGTAGACTCGCCCCAGCTCG | |
| | | | CCACGCTAGCTGACGAGGTGTCTGCCTCC | |
| | | | CTGGCCAAGCAGGGTTTGTGA | |
| Mouse | NM_001038609 | N/A | ATGGCTGACCCTCGCCAGGAGTTTGACA | 910 |
| MAPT | | | CAATGGAAGACCATGCTGGAGATTACAC | |
| RefSeq | | | TCTGCTCCAAGACCAAGAAGGAGACATG | |
| | | | GACCATGGCTTAAAAGAGTCTCCCCCAC | |
| | | | AGCCCCCCGCCGATGATGGAGCGGAGGA | |
| | | | ACCAGGGTCGGAGACCTCCGATGCTAAG | |
| | | | AGCACTCCAACTGCTGAAGACGTGACTG | |
| | | | CGCCCCTAGTGGATGAGAGAGCTCCCGA | |
| | | | CAAGCAGGCCGCTGCCCAGCCCCACACG | |
| | | | GAGATCCCAGAAGGAATTACAGCCGAAG | |
| | | | AAGCAGGCATCGGAGACACCCCGAACCA | |
| | | | GGAGGACCAAGCCGCTGGGCATGTGACT | |
| | | | CAAGCTCGTGTGGCCAGCAAAGACAGGA | |
| | | | CAGGAAATGACGAGAAGAAAGCCAAGG | |
| | | | GCGCTGATGGCAAAACCGGGGCGAAGAT | |
| | | | CGCCACACCTCGGGGAGCAGCCTCTCCG | |
| | | | GCCCAGAAGGGCACGTCCAACGCCACCA | |
| | | | GGATCCCGGCCAAGACCACGCCCAGCCC | |
| | | | TAAGACTCCTCCAGGGTCAGGTGAACCA | |
| | | | CCAAAATCCGGAGAACGAAGCGGCTACA | |
| | | | GCAGCCCCGGCTCTCCCGGAACGCCTGG | |
| | | | CAGTCGCTCGCGCACCCCATCCCTACCAA | |
| | | | CACCGCCCACCCGGGAGCCCAAGAAGGT | |
| | | | GGCAGTGGTCCGCACTCCCCCTAAGTCAC | |
| | | | CATCAGCTAGTAAGAGCCGCCTGCAGAC | |
| | | | TGCCCCTGTGCCCATGCCAGACCTAAAG | |
| | | | AATGTCAGGTCGAAGATTGGCTCTACTG | |
| | | | AGAACCTGAAGCACCAGCCAGGAGGTGG | |
| | | | CAAGGTGCAGATAATTAATAAGAAGCTG | |
| | | | GATCTTAGCAACGTCCAGTCCAAGTGTG | |
| | | | GCTCGAAGGATAATATCAAACACGTCCC | |
| | | | GGGTGGAGGCAGTGTGCAAATAGTCTAC | |
| | | | AAGCCGGTGGACCTGAGCAAAGTGACCT | |
| | | | CCAAGTGTGGCTCGTTAGGGAACATCCA | |
| | | | TCACAAGCCAGGAGGTGGCCAGGTGGAA | |
| | | | GTAAAATCAGAGAAGCTGGACTTCAAGG | |
| | | | ACAGAGTCCAGTCGAAGATTGGCTCCTT | |
| | | | GGATAATATCACCCACGTCCCTGGAGGA | |
| | | | GGGAATAAGAAGATTGAAACCCACAAGC | |
| | | | TGACCTTCAGGGAGAATGCCAAAGCCAA | |
| | | | GACAGACCATGGAGCAGAAATTGTGTAT | |
| | | | AAGTCACCCGTGGTGTCTGGGGACACAT | |
| | | | CTCCACGGCACCTCAGCAATGTGTCTTCC | |
| | | | ACGGGCAGCATCGACATGGTGGACTCAC | |
| | | | CACAGCTTGCCACACTAGCCGATGAAGT | |
| | | | GTCTGCTTCCTTGGCCAAGCAGGGTTTGT | |
| | | | GA | |
| Monkey | XM_005584531 | N/A | ATGGCTGAGCCCCGCCAGGAGTTCGATG | 911 |
| MAPT | | | TGATGGAAGATCACGCTGGGACGTACGG | |
| RefSEQ | | | GTTGGGGGACAGGAAAGATCAAGAGGGC | |
| | | | TACACCATGCTCCAAGACCAAGAGGGTG | |
| | | | ACACGGACGCTGGCCTGAAAGAATCTCC | |
| | | | CCTGCAGACCCCCGCTGAGGATGGATCT | |
| | | | GAGGAACTGGGCTCTGAAACCTCTGATG | |
| | | | CTAAGAGCACTCCAACGGCGGAAGCTGA | |
| | | | GGAAGCAGGCATCGGAGACACCCCCAGC | |
| | | | CTGGAAGACGAAGCTGCTGGTCACGTGA | |
| | | | CCCAAGAGGAGTTGAGAGTTCCGGGCCA | |
| | | | GCAGAGGAAGGCACCTGAAAGGCCCCTG | |
| | | | GCCAATGAGATTAGTGCTCACGTCCAGC | |
| | | | CTGGACCCTGCAAAGAGGCCTCTGGGGT | |
| | | | CTCTGGGCTGTGCATGGGGGAGAAAGAG | |
| | | | CCAGAAGCTCCCATCCCACTGACCGCGA | |
| | | | GCCTTCCTCAGCACCGTCCCATTTGCTCA | |
| | | | GCGCCTCCTCCAACAGGAGGCCCTCGAG | |
| | | | AGCCCTCCCAGGAGTGGGGACGAAAAGG | |
| | | | TGGGGACTGGGCCGAGAAGGGTCCGACC | |
| | | | TTTCCGAAGTCCGCCACCCCTGCGTATCT | |
| | | | CCACACAGAGCCTGAAAGTGGTAAGGTG | |
| | | | GTCCAGGAAGTCTTCCTCGGAGAGCCAG | |
| | | | GCCCCCCAGGTCTGAGCCACCAGCTCGT | |
| | | | GTCCAGCATGCCTGGGGCTCCCCTCCTGC | |
| | | | CTGAGGGCCCCAGAGAGGCCACACGCCA | |
| | | | GCCTTCAGGGACAGGACCTGAGGACACA | |
| | | | GAGGGTGGCCAACACGCCCCTGAGCTGC | |
| | | | TCAAGCACCAGCTTCTGGGAGACCTGCA | |
| | | | CCAGGAGGGGCCGCCACTGAAGGGAGCC | |
| | | | GGGGGCAAAGAGAGGCTGGGGAGCAAG | |
| | | | GAGGAGGTGGATGAAGACCGCGACGTCG | |
| | | | ATGAGTCCTCCCCGCAAGACTCCCCTCCA | |
| | | | TCCAGGGTCTCCCCAGTCCAAGATGGGC | |
| | | | AGCCTCCCCAGACAGCCGCCAGAGAAGC | |
| | | | CACCAGCGTCCCAGGCTTCCCAGCGGAG | |
| | | | GGTGCCATTGCCCTCCCTGTGGATTTCCT | |
| | | | CTCCAGAGTTTCCACAGAGATCCCAGCCT | |
| | | | CTGAGCCCGAGGGGCCCAGTGCAGGGTG | |
| | | | GGCTGAAGGGCAGGACATGCCCCCTGAG | |
| | | | TTCACGTTCCACGTGGAAATCACACCCAA | |
| | | | CGTGCAGAAGGAGCAGGCGCACCCGGAG | |
| | | | GAGGATTCGGGAAGGGCTGCATTTCCAG | |
| | | | GGGCTCCTGGAGAGGAGCCAGAGGCCCG | |
| | | | GGGCCCCTCTTTGGGAGAGGACACAAAA | |
| | | | GAGGCTGAGCTTCCAGAGCCCACTGAAA | |
| | | | AGCAGCCTGCTGCTGCTCCGCGGGGAAA | |
| | | | ACCCGTCAGCCGGGTCCCTCAACTCAAA | |
| | | | GCTCGCATGGTCAGTAAAAGCAAAGACG | |
| | | | GGACTGGAAGCGATGACAAAAAAGCCAA | |
| | | | GACATCCACACGTTCCTCTGCTAAAACCT | |
| | | | TGAAAAATAGGCCTTGCCTTAGCCCCAA | |
| | | | ACACCCCACTCCTGGTAGCTCAGACCCTC | |
| | | | TGATCCAACCCTCCAGCCCTGCCGTGTGC | |
| | | | CCAGAGCCACCTTCCTCTCCTAAATACGT | |
| | | | CTCTTCTGTCACTCCCCGAACTGGCAGTT | |
| | | | CTGGAGCAAAGGAGATGAAACTCAAGGG | |
| | | | GGCTGATGGGAAAACGAAGATCGCCACA | |
| | | | CCCCGGGGAGCGGCCCCTCCAGGCCAGA | |
| | | | AGGGCCAAGCCAACGCCACCAGGATTCC | |
| | | | AGCAAAAACCCCGCCCGCCCCAAAGACA | |
| | | | CCACCCAGCTCTGCGACCAAGCAAGTGC | |
| | | | AGAGAAAACCACCCCCTGCAGAGCCCAC | |
| | | | ATCTGAGAGAGGTGAACCTCCAAAATCA | |
| | | | GGGGATCGCAGTGGCTACAGCAGCCCCG | |
| | | | GCTCCCCGGGCACTCCCGGCAGCCGCTC | |
| | | | CCGCACCCCGTCCCTTCCAACCCCTCCAG | |
| | | | CCCGGGAGCCCAAGAAGGTGGCGGTGGT | |
| | | | CCGTACTCCACCTAAGTCGCCGTCTTCCG | |
| | | | CCAAGAGCCGCCTGCAGACAGCCCCCGT | |
| | | | GCCCATGCCAGACCTGAAGAACGTCAAG | |
| | | | TCCAAGATCGGCTCCACCGAGAACCTGA | |
| | | | AGCACCAGCCGGGAGGCGGGAAGGTGCA | |
| | | | GATAATTAATAAGAAGCTGGATCTTAGC | |
| | | | AACGTCCAGTCCAAGTGTGGCTCAAAGG | |
| | | | ATAATATCAAACACGTCCCGGGAGGCGG | |
| | | | CAGTGTGCAAATAGTCTACAAACCAGTT | |
| | | | GACCTGAGCAAGGTGACCTCCAAGTGTG | |
| | | | GCTCATTAGGCAACATCCATCATAAACC | |
| | | | AGGAGGTGGCCAGGTGGAAGTAAAATCT | |
| | | | GAGAAGCTGGACTTCAAGGACAGAGTGC | |
| | | | AGTCGAAGATCGGGTCCCTGGACAATAT | |
| | | | CACCCATGTCCCTGGCGGAGGAAATAAA | |
| | | | AAGATTGAAACCCACAAGCTGACCTTCC | |
| | | | GCGAGAACGCCAAAGCCAAGACAGACCA | |
| | | | CGGGGCGGAAATCGTGTACAAGTCGCCG | |
| | | | GTGGTGTCTGGGGACACGTCTCCACGGC | |
| | | | ACCTCAGCAATGTCTCCTCCACCGGCAGC | |
| | | | ATCGACATGGTAGACTCGCCCCAGCTCG | |
| | | | CCACGCTAGCCGACGAGGTGTCTGCCTCC | |
| | | | CTGGCCAAGCAGGGTTTGTGA | |
| MAPT- | 19 mer | 2141-2218- | GAGAACCUGAAGCACCAGC | 912 |
| 2141 | sense | 966 (Hs- | | |
| | strand | Mf-Mm) | | |
| MAPT- | 19 mer | 2142-2219- | AGAACCUGAAGCACCAGCC | 913 |
| 2142 | sense | 967 (Hs- | | |
| | strand | Mf-Mm) | | |
| MAPT- | 19 mer | 2303-2380- | GUGACCUCCAAGUGUGGCU | 914 |
| 2303 | sense | 1128 (Hs- | | |
| | strand | Mf-Mm) | | |
| MAPT- | 19 mer | 2347-2424- | AGGAGGUGGCCAGGUGGAA | 915 |
| 2347 | sense | 1172 (Hs- | | |
| | strand | Mf-Mm) | | |
| MAPT- | 19 mer | 2349-2426- | GAGGUGGCCAGGUGGAAGU | 916 |
| 2349 | sense | 1174 (Hs- | | |
| | strand | Mf-Mm) | | |
| MAPT- | 19 mer | 2350-2427- | AGGUGGCCAGGUGGAAGUA | 917 |
| 2350 | sense | 1175 (Hs- | | |
| | strand | Mf-Mm) | | |
| MAPT- | 19 mer | 2351-2428- | GGUGGCCAGGUGGAAGUAA | 918 |
| 2351 | sense | 1176 (Hs- | | |
| | strand | Mf-Mm) | | |
| MAPT- | 19 mer | 2352-2429- | GUGGCCAGGUGGAAGUAAA | 919 |
| 2352 | sense | 1177 (Hs- | | |
| | strand | Mf-Mm) | | |
| MAPT- | 19 mer | 2353-2430- | UGGCCAGGUGGAAGUAAAA | 920 |
| 2353 | sense | 1178 (Hs- | | |
| | strand | Mf-Mm) | | |
| MAPT- | 19 mer | 2354-2431- | GGCCAGGUGGAAGUAAAAU | 921 |
| 2354 | sense | 1179 (Hs- | | |
| | strand | Mf-Mm) | | |
| MAPT- | 19 mer | 2355-2432- | GCCAGGUGGAAGUAAAAUC | 922 |
| 2355 | sense | 1180 (Hs- | | |
| | strand | Mf-Mm) | | |
| MAPT- | 19 mer | 2459-2536- | AAGAUUGAAACCCACAAGC | 923 |
| 2459 | sense | 1284 (Hs- | | |
| | strand | Mf-Mm) | | |
| MAPT- | 19 mer | 2460-2537- | AGAUUGAAACCCACAAGCU | 924 |
| 2460 | sense | 1285 (Hs- | | |
| | strand | Mf-Mm) | | |
| MAPT- | 19 mer | 2461-2538- | GAUUGAAACCCACAAGCUG | 925 |
| 2461 | sense | 1286 (Hs- | | |
| | strand | Mf-Mm) | | |
| MAPT- | 19 mer | 2462-2539- | AUUGAAACCCACAAGCUGA | 926 |
| 2462 | sense | 1287 (Hs- | | |
| | strand | Mf-Mm) | | |
| MAPT- | 19 mer | 2463-2540- | UUGAAACCCACAAGCUGAC | 927 |
| 2463 | sense | 1288 (Hs- | | |
| | strand | Mf-Mm) | | |
| MAPT- | 19 mer | 2464-2541- | UGAAACCCACAAGCUGACC | 928 |
| 2464 | sense | 1289 (Hs- | | |
| | strand | Mf-Mm) | | |
| MAPT- | 19 mer | 2465-2542- | GAAACCCACAAGCUGACCU | 929 |
| 2465 | sense | 1290 (Hs- | | |
| | strand | Mf-Mm) | | |
| MAPT- | 19 mer | 2466-2543- | AAACCCACAAGCUGACCUU | 930 |
| 2466 | sense | 1291 (Hs- | | |
| | strand | Mf-Mm) | | |
| MAPT- | 19 mer | 2467-2544- | AACCCACAAGCUGACCUUC | 931 |
| 2467 | sense | 1292 (Hs- | | |
| | strand | Mf-Mm) | | |
| MAPT- | 19 mer | 2495-2572- | GCCAAAGCCAAGACAGACC | 932 |
| 2495 | sense | 1320 (Hs- | | |
| | strand | Mf-Mm) | | |
| MAPT- | 19 mer | 2496-2573- | CCAAAGCCAAGACAGACCA | 933 |
| 2496 | sense | 1321 (Hs- | | |
| | strand | Mf-Mm) | | |
| MAPT- | 19 mer | 3686-3758- | UCUUUGUAAGGACUUGUGC | 934 |
| 3686 | sense | 2505 (Hs- | | |
| | strand | Mf-Mm) | | |
| MAPT- | 19 mer | 3687-3759- | CUUUGUAAGGACUUGUGCC | 935 |
| 3687 | sense | 2506 (Hs- | | |
| | strand | Mf-Mm) | | |
| MAPT- | 19 mer | 3688-3760- | UUUGUAAGGACUUGUGCCU | 936 |
| 3688 | sense | 2507 (Hs- | | |
| | strand | Mf-Mm) | | |
| MAPT- | 19 mer | 3691-3763- | GUAAGGACUUGUGCCUCUU | 937 |
| 3691 | sense | 2510 (Hs- | | |
| | strand | Mf-Mm) | | |
| MAPT- | 19 mer | 3692-3764- | UAAGGACUUGUGCCUCUUG | 938 |
| 3692 | sense | 2511 (Hs- | | |
| | strand | Mf-Mm) | | |
| MAPT- | 19 mer | 3693-3765- | AAGGACUUGUGCCUCUUGG | 939 |
| 3693 | sense | 2512 (Hs- | | |
| | strand | Mf-Mm) | | |
| MAPT- | 19 mer | 4534-4605- | GUUGUAGUUGGAUUUGUCU | 940 |
| 4534 | sense | 3332 (Hs- | | |
| | strand | Mf-Mm) | | |
| MAPT- | 19 mer | 4535-4606- | UUGUAGUUGGAUUUGUCUG | 941 |
| 4535 | sense | 3333 (Hs- | | |
| | strand | Mf-Mm) | | |
| MAPT- | 19 mer | 4536-4607- | UGUAGUUGGAUUUGUCUGU | 942 |
| 4536 | sense | 3334 (Hs- | | |
| | strand | Mf-Mm) | | |
| MAPT- | 19 mer | 4537-4608- | GUAGUUGGAUUUGUCUGUU | 943 |
| 4537 | sense | 3335 (Hs- | | |
| | strand | Mf-Mm) | | |
| MAPT- | 19 mer | 4538-4609- | UAGUUGGAUUUGUCUGUUU | 944 |
| 4538 | sense | 3336 (Hs- | | |
| | strand | Mf-Mm) | | |
| MAPT- | 19 mer | 4566-4637- | UUCACCAGAGUGACUAUGA | 945 |
| 4566 | sense | 3362 (Hs- | | |
| | strand | Mf-Mm) | | |
| MAPT- | 19 mer | 4567-4638- | UCACCAGAGUGACUAUGAU | 946 |
| 4567 | sense | 3363 (Hs- | | |
| | strand | Mf-Mm) | | |
| MAPT- | 19 mer | 4568-4639- | CACCAGAGUGACUAUGAUA | 947 |
| 4568 | sense | 3364 (Hs- | | |
| | strand | Mf-Mm) | | |
| MAPT- | 19 mer | 4569-4640- | ACCAGAGUGACUAUGAUAG | 948 |
| 4569 | sense | 3365 (Hs- | | |
| | strand | Mf-Mm) | | |
| MAPT- | 19 mer | 4570-4641- | CCAGAGUGACUAUGAUAGU | 949 |
| 4570 | sense | 3366 (Hs- | | |
| | strand | Mf-Mm) | | |
| MAPT- | 19 mer | 4571-4642- | CAGAGUGACUAUGAUAGUG | 950 |
| 4571 | sense | 3367 (Hs- | | |
| | strand | Mf-Mm) | | |
| MAPT- | 19 mer | 4572-4643- | AGAGUGACUAUGAUAGUGA | 951 |
| 4572 | sense | 3368 (Hs- | | |
| | strand | Mf-Mm) | | |
| MAPT- | 19 mer | 4573-4644- | GAGUGACUAUGAUAGUGAA | 952 |
| 4573 | sense | 3369 (Hs- | | |
| | strand | Mf-Mm) | | |
| MAPT- | 19 mer | 4574-4645- | AGUGACUAUGAUAGUGAAA | 953 |
| 4574 | sense | 3370 (Hs- | | |
| | strand | Mf-Mm) | | |
| MAPT- | 19 mer | 4575-4646- | GUGACUAUGAUAGUGAAAA | 954 |
| 4575 | sense | 3371 (Hs- | | |
| | strand | Mf-Mm) | | |
| MAPT- | 19 mer | 4576-4647- | UGACUAUGAUAGUGAAAAG | 955 |
| 4576 | sense | 3372 (Hs- | | |
| | strand | Mf-Mm) | | |
| MAPT- | 19 mer | 4577-4648- | GACUAUGAUAGUGAAAAGA | 956 |
| 4577 | sense | 3373 (Hs- | | |
| | strand | Mf-Mm) | | |
| MAPT- | 19 mer | 4578-4649- | ACUAUGAUAGUGAAAAGAA | 957 |
| 4578 | sense | 3374 (Hs- | | |
| | strand | Mf-Mm) | | |
| MAPT- | 19 mer | 4579-4650- | CUAUGAUAGUGAAAAGAAA | 958 |
| 4579 | sense | 3375 (Hs- | | |
| | strand | Mf-Mm) | | |
| MAPT- | 19 mer | 4580-4651- | UAUGAUAGUGAAAAGAAAA | 959 |
| 4580 | sense | 3376 (Hs- | | |
| | strand | Mf-Mm) | | |
| MAPT- | 19 mer | 4605-4677- | AAAAAAAAGGACGCAUGUA | 960 |
| 4605 | sense | 3439 (Hs- | | |
| | strand | Mf-Mm) | | |
| MAPT- | 19 mer | 4606-4678- | AAAAAAAGGACGCAUGUAU | 961 |
| 4606 | sense | 3440 (Hs- | | |
| | strand | Mf-Mm) | | |
| MAPT- | 19 mer | 4607-4679- | AAAAAAGGACGCAUGUAUC | 962 |
| 4607 | sense | 3441 (Hs- | | |
| | strand | Mf-Mm) | | |
| MAPT- | 19 mer | 4608-4680- | AAAAAGGACGCAUGUAUCU | 963 |
| 4608 | sense | 3442 (Hs- | | |
| | strand | Mf-Mm) | | |
| MAPT- | 19 mer | 4609-4681- | AAAAGGACGCAUGUAUCUU | 964 |
| 4609 | sense | 3443 (Hs- | | |
| | strand | Mf-Mm) | | |
| MAPT- | 19 mer | 4610-4682- | AAAGGACGCAUGUAUCUUG | 965 |
| 4610 | sense | 3444 (Hs- | | |
| | strand | Mf-Mm) | | |
| MAPT- | 19 mer | 4611-4683- | AAGGACGCAUGUAUCUUGA | 966 |
| 4611 | sense | 3445 (Hs- | | |
| | strand | Mf-Mm) | | |
| MAPT- | 19 mer | 4612-4684- | AGGACGCAUGUAUCUUGAA | 967 |
| 4612 | sense | 3446 (Hs- | | |
| | strand | Mf-Mm) | | |
| MAPT- | 19 mer | 4613-4685- | GGACGCAUGUAUCUUGAAA | 968 |
| 4613 | sense | 3447 (Hs- | | |
| | strand | Mf-Mm) | | |
| MAPT- | 19 mer | 4614-4686- | GACGCAUGUAUCUUGAAAU | 969 |
| 4614 | sense | 3448 (Hs- | | |
| | strand | Mf-Mm) | | |
| MAPT- | 19 mer | 5969-6024- | UCACUUUAUCAAUAGUUCC | 970 |
| 5969 | sense | 4540 (Hs- | | |
| | strand | Mf-Mm) | | |
| MAPT- | 19 mer | 5970-6025- | CACUUUAUCAAUAGUUCCA | 971 |
| 5970 | sense | 4541 (Hs- | | |
| | strand | Mf-Mm) | | |
| MAPT- | 19 mer | 5971-6026- | ACUUUAUCAAUAGUUCCAU | 972 |
| 5971 | sense | 4542 (Hs- | | |
| | strand | Mf-Mm) | | |
| MAPT- | 19 mer | 5972-6027- | CUUUAUCAAUAGUUCCAUU | 973 |
| 5972 | sense | 4543 (Hs- | | |
| | strand | Mf-Mm) | | |
| MAPT- | 19 mer | 5973-6028- | UUUAUCAAUAGUUCCAUUU | 974 |
| 5973 | sense | 4544 (Hs- | | |
| | strand | Mf-Mm) | | |
| MAPT- | 19 mer | 5974-6029- | UUAUCAAUAGUUCCAUUUA | 975 |
| 5974 | sense | 4545 (Hs- | | |
| | strand | Mf-Mm) | | |
| MAPT- | 19 mer | 5975-6030- | UAUCAAUAGUUCCAUUUAA | 976 |
| 5975 | sense | 4546 (Hs- | | |
| | strand | Mf-Mm) | | |
| MAPT- | 19 mer | 5976-6031- | AUCAAUAGUUCCAUUUAAA | 977 |
| 5976 | sense | 4547 (Hs- | | |
| | strand | Mf-Mm) | | |
| MAPT- | 19 mer | 5977-6032- | UCAAUAGUUCCAUUUAAAU | 978 |
| 5977 | sense | 4548 (Hs- | | |
| | strand | Mf-Mm) | | |
| MAPT- | 19 mer | 5978-6033- | CAAUAGUUCCAUUUAAAUU | 979 |
| 5978 | sense | 4549 (Hs- | | |
| | strand | Mf-Mm) | | |
| MAPT- | 19 mer | 5979-6034- | AAUAGUUCCAUUUAAAUUG | 980 |
| 5979 | sense | 4550 (Hs- | | |
| | strand | Mf-Mm) | | |
| MAPT- | 19 mer | 5980-6035- | AUAGUUCCAUUUAAAUUGA | 981 |
| 5980 | sense | 4551 (Hs- | | |
| | strand | Mf-Mm) | | |
| MAPT- | 19 mer | 5981-6036- | UAGUUCCAUUUAAAUUGAC | 982 |
| 5981 | sense | 4552 (Hs- | | |
| | strand | Mf-Mm) | | |
| MAPT- | 19 mer | 5982-6037- | AGUUCCAUUUAAAUUGACU | 983 |
| 5982 | sense | 4553 (Hs- | | |
| | strand | Mf-Mm) | | |
| MAPT- | 19 mer | 5983-6038- | GUUCCAUUUAAAUUGACUU | 984 |
| 5983 | sense | 4554 (Hs- | | |
| | strand | Mf-Mm) | | |
| MAPT- | 19 mer | 5984-6039- | UUCCAUUUAAAUUGACUUC | 985 |
| 5984 | sense | 4555 (Hs- | | |
| | strand | Mf-Mm) | | |
| MAPT- | 19 mer | 5985-6040- | UCCAUUUAAAUUGACUUCA | 986 |
| 5985 | sense | 4556 (Hs- | | |
| | strand | Mf-Mm) | | |
| MAPT- | 19 mer | 6662-6723- | CUUGCAAGUCCCAUGAUUU | 987 |
| 6662 | sense | 5230 (Hs- | | |
| | strand | Mf-Mm) | | |
| MAPT- | 19 mer | 6663-6724- | UUGCAAGUCCCAUGAUUUC | 988 |
| 6663 | sense | 5231 (Hs- | | |
| | strand | Mf-Mm) | | |
| MAPT- | 19 mer | 6664-6725- | UGCAAGUCCCAUGAUUUCU | 989 |
| 6664 | sense | 5232 (Hs- | | |
| | strand | Mf-Mm) | | |
| MAPT- | 19 mer | 6665-6726- | GCAAGUCCCAUGAUUUCUU | 990 |
| 6665 | sense | 5233 (Hs- | | |
| | strand | Mf-Mm) | | |
| MAPT- | 19 mer | 6800-6861- | GUAAAAGUGAAUUUGGAAA | 991 |
| 6800 | sense | 5365 (Hs- | | |
| | strand | Mf-Mm) | | |
| MAPT- | 19 mer | 6801-6862- | UAAAAGUGAAUUUGGAAAU | 992 |
| 6801 | sense | 5366 (Hs- | | |
| | strand | Mf-Mm) | | |
| MAPT- | 19 mer | 6802-6863- | AAAAGUGAAUUUGGAAAUA | 993 |
| 6802 | sense | 5367 (Hs- | | |
| | strand | Mf-Mm) | | |
| MAPT- | 19 mer | 6803-6864- | AAAGUGAAUUUGGAAAUAA | 994 |
| 6803 | sense | 5368 (Hs- | | |
| | strand | Mf-Mm) | | |
| MAPT- | 19 mer | 6804-6865- | AAGUGAAUUUGGAAAUAAA | 995 |
| 6804 | sense | 5369 (Hs- | | |
| | strand | Mf-Mm) | | |
| MAPT- | 19 mer | 6805-6866- | AGUGAAUUUGGAAAUAAAG | 996 |
| 6805 | sense | 5370 (Hs- | | |
| | strand | Mf-Mm) | | |
| MAPT- | 19 mer | 6806-6867- | GUGAAUUUGGAAAUAAAGU | 997 |
| 6806 | sense | 5371 (Hs- | | |
| | strand | Mf-Mm) | | |
| MAPT- | 19 mer | 6807-6868- | UGAAUUUGGAAAUAAAGUU | 998 |
| 6807 | sense | 5372 (Hs- | | |
| | strand | Mf-Mm) | | |
| MAPT- | 19 mer | 6808-6869- | GAAUUUGGAAAUAAAGUUA | 999 |
| 6808 | sense | 5373 (Hs- | | |
| | strand | Mf-Mm) | | |
| MAPT- | 19 mer | 6809-6870- | AAUUUGGAAAUAAAGUUAU | 1000 |
| 6809 | sense | 5374 (Hs- | | |
| | strand | Mf-Mm) | | |
| MAPT- | 19 mer | 6810-6871- | AUUUGGAAAUAAAGUUAUU | 1001 |
| 6810 | sense | 5375 (Hs- | | |
| | strand | Mf-Mm) | | |
| MAPT- | 19 mer | 6811-6872- | UUUGGAAAUAAAGUUAUUA | 1002 |
| 6811 | sense | 5376 (Hs- | | |
| | strand | Mf-Mm) | | |
| MAPT- | 19 mer | 6812-6873- | UUGGAAAUAAAGUUAUUAC | 1003 |
| 6812 | sense | 5377 (Hs- | | |
| | strand | Mf-Mm) | | |
| MAPT- | 19 mer | 6813-6874- | UGGAAAUAAAGUUAUUACU | 1004 |
| 6813 | sense | 5378 (Hs- | | |
| | strand | Mf-Mm) | | |
| MAPT- | 19 mer | 6814-6875- | GGAAAUAAAGUUAUUACUC | 1005 |
| 6814 | sense | 5379 (Hs- | | |
| | strand | Mf-Mm) | | |
| MAPT- | 19 mer | 6815-6876- | GAAAUAAAGUUAUUACUCU | 1006 |
| 6815 | sense | 5380 (Hs- | | |
| | strand | Mf-Mm) | | |
| MAPT- | 19 mer | 6816-6877- | AAAUAAAGUUAUUACUCUG | 1007 |
| 6816 | sense | 5381 (Hs- | | |
| | strand | Mf-Mm) | | |
| MAPT- | 19 mer | 363 (Hs) | AGGAGUUCGAAGUGAUGGA | 1008 |
| 363 | sense | | | |
| | strand | | | |
| MAPT- | 19 mer | 364 (Hs) | GGAGUUCGAAGUGAUGGAA | 1009 |
| 364 | sense | | | |
| | strand | | | |
| MAPT- | 19 mer | 365 (Hs) | GAGUUCGAAGUGAUGGAAG | 1010 |
| 365 | sense | | | |
| | strand | | | |
| MAPT- | 19 mer | 367 (Hs) | GUUCGAAGUGAUGGAAGAU | 1011 |
| 367 | sense | | | |
| | strand | | | |
| MAPT- | 19 mer | 369 (Hs) | UCGAAGUGAUGGAAGAUCA | 1012 |
| 369 | sense | | | |
| | strand | | | |
| MAPT- | 19 mer | 374-226 | GUGAUGGAAGAUCACGCUG | 1013 |
| 374 | sense | (Hs-Mf) | | |
| | strand | | | |
| MAPT- | 19 mer | 395-247 | ACGUACGGGUUGGGGGACA | 1014 |
| 395 | sense | (Hs-Mf) | | |
| | strand | | | |
| MAPT- | 19 mer | 400-252 | CGGGUUGGGGGACAGGAAA | 1015 |
| 400 | sense | (Hs-Mf) | | |
| | strand | | | |
| MAPT- | 19 mer | 443-295 | CAAGACCAAGAGGGUGACA | 1016 |
| 443 | sense | (Hs-Mf) | | |
| | strand | | | |
| MAPT- | 19 mer | 688-453 | GGAAGACGAAGCUGCUGGU | 1017 |
| 688 | sense | (Hs-Mf) | | |
| | strand | | | |
| MAPT- | 19 mer | 689-454 | GAAGACGAAGCUGCUGGUC | 1018 |
| 689 | sense | (Hs-Mf) | | |
| | strand | | | |
| MAPT- | 19 mer | 690-455 | AAGACGAAGCUGCUGGUCA | 1019 |
| 690 | sense | (Hs-Mf) | | |
| | strand | | | |
| MAPT- | 19 mer | 693-458 | ACGAAGCUGCUGGUCACGU | 1020 |
| 693 | sense | (Hs-Mf) | | |
| | strand | | | |
| MAPT- | 19 mer | 695-460 | GAAGCUGCUGGUCACGUGA | 1021 |
| 695 | sense | (Hs-Mf) | | |
| | strand | | | |
| MAPT- | 19 mer | 696-461 | AAGCUGCUGGUCACGUGAC | 1022 |
| 696 | sense | (Hs-Mf) | | |
| | strand | | | |
| MAPT- | 19 mer | 1475-1552 | CGCAUGGUCAGUAAAAGCA | 1023 |
| 1475 | sense | (Hs-Mf) | | |
| | strand | | | |
| MAPT- | 19 mer | 1476-1553 | GCAUGGUCAGUAAAAGCAA | 1024 |
| 1476 | sense | (Hs-Mf) | | |
| | strand | | | |
| MAPT- | 19 mer | 1479-1556 | UGGUCAGUAAAAGCAAAGA | 1025 |
| 1479 | sense | (Hs-Mf) | | |
| | strand | | | |
| MAPT- | 19 mer | 1480-1557 | GGUCAGUAAAAGCAAAGAC | 1026 |
| 1480 | sense | (Hs-Mf) | | |
| | strand | | | |
| MAPT- | 19 mer | 1481-1558 | GUCAGUAAAAGCAAAGACG | 1027 |
| 1481 | sense | (Hs-Mf) | | |
| | strand | | | |
| MAPT- | 19 mer | 1484-1561 | AGUAAAAGCAAAGACGGGA | 1028 |
| 1484 | sense | (Hs-Mf) | | |
| | strand | | | |
| MAPT- | 19 mer | 1485-1562 | GUAAAAGCAAAGACGGGAC | 1029 |
| 1485 | sense | (Hs-Mf) | | |
| | strand | | | |
| MAPT- | 19 mer | 1492-1569 | CAAAGACGGGACUGGAAGC | 1030 |
| 1492 | sense | (Hs-Mf) | | |
| | strand | | | |
| MAPT- | 19 mer | 1494-1571 | AAGACGGGACUGGAAGCGA | 1031 |
| 1494 | sense | (Hs-Mf) | | |
| | strand | | | |
| MAPT- | 19 mer | 1495-1572 | AGACGGGACUGGAAGCGAU | 1032 |
| 1495 | sense | (Hs-Mf) | | |
| | strand | | | |
| MAPT- | 19 mer | 1498-1575 | CGGGACUGGAAGCGAUGAC | 1033 |
| 1498 | sense | (Hs-Mf) | | |
| | strand | | | |
| MAPT- | 19 mer | 1499-1576 | GGGACUGGAAGCGAUGACA | 1034 |
| 1499 | sense | (Hs-Mf) | | |
| | strand | | | |
| MAPT- | 19 mer | 1500-1577 | GGACUGGAAGCGAUGACAA | 1035 |
| 1500 | sense | (Hs-Mf) | | |
| | strand | | | |
| MAPT- | 19 mer | 1502-1579 | ACUGGAAGCGAUGACAAAA | 1036 |
| 1502 | sense | (Hs-Mf) | | |
| | strand | | | |
| MAPT- | 19 mer | 1503-1580 | CUGGAAGCGAUGACAAAAA | 1037 |
| 1503 | sense | (Hs-Mf) | | |
| | strand | | | |
| MAPT- | 19 mer | 1504-1581 | UGGAAGCGAUGACAAAAAA | 1038 |
| 1504 | sense | (Hs-Mf) | | |
| | strand | | | |
| MAPT- | 19 mer | 1505-1582 | GGAAGCGAUGACAAAAAAG | 1039 |
| 1505 | sense | (Hs-Mf) | | |
| | strand | | | |
| MAPT- | 19 mer | 1506-1583 | GAAGCGAUGACAAAAAAGC | 1040 |
| 1506 | sense | (Hs-Mf) | | |
| | strand | | | |
| MAPT- | 19 mer | 1507-1584 | AAGCGAUGACAAAAAAGCC | 1041 |
| 1507 | sense | (Hs-Mf) | | |
| | strand | | | |
| MAPT- | 19 mer | 1508-1585 | AGCGAUGACAAAAAAGCCA | 1042 |
| 1508 | sense | (Hs-Mf) | | |
| | strand | | | |
| MAPT- | 19 mer | 1509-1586 | GCGAUGACAAAAAAGCCAA | 1043 |
| 1509 | sense | (Hs-Mf) | | |
| | strand | | | |
| MAPT- | 19 mer | 1733 (Hs) | GAUGGUAAAACGAAGAUCG | 1044 |
| 1733 | sense | | | |
| | strand | | | |
| MAPT- | 19 mer | 1796-1873 | AACGCCACCAGGAUUCCAG | 1045 |
| 1796 | sense | (Hs-Mf) | | |
| | strand | | | |
| MAPT- | 19 mer | 1835-1912 | AAGACACCACCCAGCUCUG | 1046 |
| 1835 | sense | (Hs-Mf) | | |
| | strand | | | |
| MAPT- | 19 mer | 1912-1989 | ACCUCCAAAAUCAGGGGAU | 1047 |
| 1912 | sense | (Hs-Mf) | | |
| | strand | | | |
| MAPT- | 19 mer | 2094-2171 | UGCCCAUGCCAGACCUGAA | 1048 |
| 2094 | sense | (Hs-Mf) | | |
| | strand | | | |
| MAPT- | 19 mer | 2096-2173 | CCCAUGCCAGACCUGAAGA | 1049 |
| 2096 | sense | (Hs-Mf) | | |
| | strand | | | |
| MAPT- | 19 mer | 2097-2174 | CCAUGCCAGACCUGAAGAA | 1050 |
| 2097 | sense | (Hs-Mf) | | |
| | strand | | | |
| MAPT- | 19 mer | 2098 (Hs) | CAUGCCAGACCUGAAGAAU | 1051 |
| 2098 | sense | | | |
| | strand | | | |
| MAPT- | 19 mer | 2105 (Hs) | GACCUGAAGAAUGUCAAGU | 1052 |
| 2105 | sense | | | |
| | strand | | | |
| MAPT- | 19 mer | 2106 (Hs) | ACCUGAAGAAUGUCAAGUC | 1053 |
| 2106 | sense | | | |
| | strand | | | |
| MAPT- | 19 mer | 2107 (Hs) | CCUGAAGAAUGUCAAGUCC | 1054 |
| 2107 | sense | | | |
| | strand | | | |
| MAPT- | 19 mer | 2108 (Hs) | CUGAAGAAUGUCAAGUCCA | 1055 |
| 2108 | sense | | | |
| | strand | | | |
| MAPT- | 19 mer | 2109 (Hs) | UGAAGAAUGUCAAGUCCAA | 1056 |
| 2109 | sense | | | |
| | strand | | | |
| MAPT- | 19 mer | 2117-2194 | GUCAAGUCCAAGAUCGGCU | 1057 |
| 2117 | sense | (Hs-Mf) | | |
| | strand | | | |
| MAPT- | 19 mer | 2136 (Hs) | CCACUGAGAACCUGAAGCA | 1058 |
| 2136 | sense | | | |
| | strand | | | |
| MAPT- | 19 mer | 2137 (Hs) | CACUGAGAACCUGAAGCAC | 1059 |
| 2137 | sense | | | |
| | strand | | | |
| MAPT- | 19 mer | 2269-2346 | GCAAAUAGUCUACAAACCA | 1060 |
| 2269 | sense | (Hs-Mf) | | |
| | strand | | | |
| MAPT- | 19 mer | 2270-2347 | CAAAUAGUCUACAAACCAG | 1061 |
| 2270 | sense | (Hs-Mf) | | |
| | strand | | | |
| MAPT- | 19 mer | 2271-2348 | AAAUAGUCUACAAACCAGU | 1062 |
| 2271 | sense | (Hs-Mf) | | |
| | strand | | | |
| MAPT- | 19 mer | 2272-2349 | AAUAGUCUACAAACCAGUU | 1063 |
| 2272 | sense | (Hs-Mf) | | |
| | strand | | | |
| MAPT- | 19 mer | 2273-2350 | AUAGUCUACAAACCAGUUG | 1064 |
| 2273 | sense | (Hs-Mf) | | |
| | strand | | | |
| MAPT- | 19 mer | 2274-2351 | UAGUCUACAAACCAGUUGA | 1065 |
| 2274 | sense | (Hs-Mf) | | |
| | strand | | | |
| MAPT- | 19 mer | 2275-2352 | AGUCUACAAACCAGUUGAC | 1066 |
| 2275 | sense | (Hs-Mf) | | |
| | strand | | | |
| MAPT- | 19 mer | 2276-2353 | GUCUACAAACCAGUUGACC | 1067 |
| 2276 | sense | (Hs-Mf) | | |
| | strand | | | |
| MAPT- | 19 mer | 2277-2354 | UCUACAAACCAGUUGACCU | 1068 |
| 2277 | sense | (Hs-Mf) | | |
| | strand | | | |
| MAPT- | 19 mer | 2278-2355 | CUACAAACCAGUUGACCUG | 1069 |
| 2278 | sense | (Hs-Mf) | | |
| | strand | | | |
| MAPT- | 19 mer | 2279-2356 | UACAAACCAGUUGACCUGA | 1070 |
| 2279 | sense | (Hs-Mf) | | |
| | strand | | | |
| MAPT- | 19 mer | 2280-2357 | ACAAACCAGUUGACCUGAG | 1071 |
| 2280 | sense | (Hs-Mf) | | |
| | strand | | | |
| MAPT- | 19 mer | 2281-2358 | CAAACCAGUUGACCUGAGC | 1072 |
| 2281 | sense | (Hs-Mf) | | |
| | strand | | | |
| MAPT- | 19 mer | 2282-2359 | AAACCAGUUGACCUGAGCA | 1073 |
| 2282 | sense | (Hs-Mf) | | |
| | strand | | | |
| MAPT- | 19 mer | 2283-2360 | AACCAGUUGACCUGAGCAA | 1074 |
| 2283 | sense | (Hs-Mf) | | |
| | strand | | | |
| MAPT- | 19 mer | 2284-2361 | ACCAGUUGACCUGAGCAAG | 1075 |
| 2284 | sense | (Hs-Mf) | | |
| | strand | | | |
| MAPT- | 19 mer | 2286-2363 | CAGUUGACCUGAGCAAGGU | 1076 |
| 2286 | sense | (Hs-Mf) | | |
| | strand | | | |
| MAPT- | 19 mer | 2288-2365 | GUUGACCUGAGCAAGGUGA | 1077 |
| 2288 | sense | (Hs-Mf) | | |
| | strand | | | |
| MAPT- | 19 mer | 2289-2366 | UUGACCUGAGCAAGGUGAC | 1078 |
| 2289 | sense | (Hs-Mf) | | |
| | strand | | | |
| MAPT- | 19 mer | 2291-2368 | GACCUGAGCAAGGUGACCU | 1079 |
| 2291 | sense | (Hs-Mf) | | |
| | strand | | | |
| MAPT- | 19 mer | 2294-2371 | CUGAGCAAGGUGACCUCCA | 1080 |
| 2294 | sense | (Hs-Mf) | | |
| | strand | | | |
| MAPT- | 19 mer | 2299-2376 | CAAGGUGACCUCCAAGUGU | 1081 |
| 2299 | sense | (Hs-Mf) | | |
| | strand | 2300-2377 | | |
| MAPT- | 19 mer | | AAGGUGACCUCCAAGUGUG | 1082 |
| 2300 | sense | (Hs-Mf) | | |
| | strand | 2301-2378 | | |
| MAPT- | 19 mer | | AGGUGACCUCCAAGUGUGG | 1083 |
| 2301 | sense | (Hs-Mf) | | |
| | strand | | | |
| MAPT- | 19 mer | 2308-2385 | CUCCAAGUGUGGCUCAUUA | 1084 |
| 2308 | sense | (Hs-Mf) | | |
| | strand | | | |
| MAPT- | 19 mer | 2316-2393 | GUGGCUCAUUAGGCAACAU | 1085 |
| 2316 | sense | (Hs-Mf) | | |
| | strand | | | |
| MAPT- | 19 mer | 2317-2394 | UGGCUCAUUAGGCAACAUC | 1086 |
| 2317 | sense | (Hs-Mf) | | |
| | strand | | | |
| MAPT- | 19 mer | 2319-2396 | GCUCAUUAGGCAACAUCCA | 1087 |
| 2319 | sense | (Hs-Mf) | | |
| | strand | | | |
| MAPT- | 19 mer | 2320-2397 | CUCAUUAGGCAACAUCCAU | 1088 |
| 2320 | sense | (Hs-Mf) | | |
| | strand | | | |
| MAPT- | 19 mer | 2322-2399 | CAUUAGGCAACAUCCAUCA | 1089 |
| 2322 | sense | (Hs-Mf) | | |
| | strand | | | |
| MAPT- | 19 mer | 2323-2400 | AUUAGGCAACAUCCAUCAU | 1090 |
| 2323 | sense | (Hs-Mf) | | |
| | strand | | | |
| MAPT- | 19 mer | 2324-2401 | UUAGGCAACAUCCAUCAUA | 1091 |
| 2324 | sense | (Hs-Mf) | | |
| | strand | | | |
| MAPT- | 19 mer | 2326-2403 | AGGCAACAUCCAUCAUAAA | 1092 |
| 2326 | sense | (Hs-Mf) | | |
| | strand | | | |
| MAPT- | 19 mer | 2330-2407 | AACAUCCAUCAUAAACCAG | 1093 |
| 2330 | sense | (Hs-Mf) | | |
| | strand | | | |
| MAPT- | 19 mer | 2356-2433 | CCAGGUGGAAGUAAAAUCU | 1094 |
| 2356 | sense | (Hs-Mf) | | |
| | strand | | | |
| MAPT- | 19 mer | 2357-2434 | CAGGUGGAAGUAAAAUCUG | 1095 |
| 2357 | sense | (Hs-Mf) | | |
| | strand | | | |
| MAPT- | 19 mer | 2358-2435 | AGGUGGAAGUAAAAUCUGA | 1096 |
| 2358 | sense | (Hs-Mf) | | |
| | strand | | | |
| MAPT- | 19 mer | 2359-2436 | GGUGGAAGUAAAAUCUGAG | 1097 |
| 2359 | sense | (Hs-Mf) | | |
| | strand | | | |
| MAPT- | 19 mer | 2360-2437 | GUGGAAGUAAAAUCUGAGA | 1098 |
| 2360 | sense | (Hs-Mf) | | |
| | strand | | | |
| MAPT- | 19 mer | 2361-2438 | UGGAAGUAAAAUCUGAGAA | 1099 |
| 2361 | sense | (Hs-Mf) | | |
| | strand | | | |
| MAPT- | 19 mer | 2362-2439 | GGAAGUAAAAUCUGAGAAG | 1100 |
| 2362 | sense | (Hs-Mf) | | |
| | strand | | | |
| MAPT- | 19 mer | 2363-2440 | GAAGUAAAAUCUGAGAAGC | 1101 |
| 2363 | sense | (Hs-Mf) | | |
| | strand | | | |
| MAPT- | 19 mer | 2364-2441 | AAGUAAAAUCUGAGAAGCU | 1102 |
| 2364 | sense | (Hs-Mf) | | |
| | strand | | | |
| MAPT- | 19 mer | 2365 (Hs) | AGUAAAAUCUGAGAAGCUU | 1103 |
| 2365 | sense | | | |
| | strand | | | |
| MAPT- | 19 mer | 2372 (Hs) | UCUGAGAAGCUUGACUUCA | 1104 |
| 2372 | sense | | | |
| | strand | | | |
| MAPT- | 19 mer | 2373 (Hs) | CUGAGAAGCUUGACUUCAA | 1105 |
| 2373 | sense | | | |
| | strand | | | |
| MAPT- | 19 mer | 2374 (Hs) | UGAGAAGCUUGACUUCAAG | 1106 |
| 2374 | sense | | | |
| | strand | | | |
| MAPT- | 19 mer | 2375 (Hs) | GAGAAGCUUGACUUCAAGG | 1107 |
| 2375 | sense | | | |
| | strand | | | |
| MAPT- | 19 mer | 2376 (Hs) | AGAAGCUUGACUUCAAGGA | 1108 |
| 2376 | sense | | | |
| | strand | | | |
| MAPT- | 19 mer | 2377 (Hs) | GAAGCUUGACUUCAAGGAC | 1109 |
| 2377 | sense | | | |
| | strand | | | |
| MAPT- | 19 mer | 2378 (Hs) | AAGCUUGACUUCAAGGACA | 1110 |
| 2378 | sense | | | |
| | strand | | | |
| MAPT- | 19 mer | 2379 (Hs) | AGCUUGACUUCAAGGACAG | 1111 |
| 2379 | sense | | | |
| | strand | | | |
| MAPT- | 19 mer | 2380 (Hs) | GCUUGACUUCAAGGACAGA | 1112 |
| 2380 | sense | | | |
| | strand | | | |
| MAPT- | 19 mer | 2381 (Hs) | CUUGACUUCAAGGACAGAG | 1113 |
| 2381 | sense | | | |
| | strand | | | |
| MAPT- | 19 mer | 2382 (Hs) | UUGACUUCAAGGACAGAGU | 1114 |
| 2382 | sense | | | |
| | strand | | | |
| MAPT- | 19 mer | 2390 (Hs) | AAGGACAGAGUCCAGUCGA | 1115 |
| 2390 | sense | | | |
| | strand | | | |
| MAPT- | 19 mer | 2391 (Hs) | AGGACAGAGUCCAGUCGAA | 1116 |
| 2391 | sense | | | |
| | strand | | | |
| MAPT- | 19 mer | 2414-2491 | GGGUCCCUGGACAAUAUCA | 1117 |
| 2414 | sense | (Hs-Mf) | | |
| | strand | | | |
| MAPT- | 19 mer | 2448-2525 | GAGGAAAUAAAAAGAUUGA | 1118 |
| 2448 | sense | (Hs-Mf) | | |
| | strand | | | |
| MAPT- | 19 mer | 2449-2526 | AGGAAAUAAAAAGAUUGAA | 1119 |
| 2449 | sense | (Hs-Mf) | | |
| | strand | | | |
| MAPT- | 19 mer | 2450-2527 | GGAAAUAAAAAGAUUGAAA | 1120 |
| 2450 | sense | (Hs-Mf) | | |
| | strand | | | |
| MAPT- | 19 mer | 2451-2528 | GAAAUAAAAAGAUUGAAAC | 1121 |
| 2451 | sense | (Hs-Mf) | | |
| | strand | | | |
| MAPT- | 19 mer | 2452-2529 | AAAUAAAAAGAUUGAAACC | 1122 |
| 2452 | sense | (Hs-Mf) | | |
| | strand | | | |
| MAPT- | 19 mer | 2453-2530 | AAUAAAAAGAUUGAAACCC | 1123 |
| 2453 | sense | (Hs-Mf) | | |
| | strand | | | |
| MAPT- | 19 mer | 2454-2531 | AUAAAAAGAUUGAAACCCA | 1124 |
| 2454 | sense | (Hs-Mf) | | |
| | strand | | | |
| MAPT- | 19 mer | 2456-2533 | AAAAAGAUUGAAACCCACA | 1125 |
| 2456 | sense | (Hs-Mf) | | |
| | strand | | | |
| MAPT- | 19 mer | 2457-2534 | AAAAGAUUGAAACCCACAA | 1126 |
| 2457 | sense | (Hs-Mf) | | |
| | strand | | | |
| MAPT- | 19 mer | 2567 (Hs) | CGGCAUCUCAGCAAUGUCU | 1127 |
| 2567 | sense | | | |
| | strand | | | |
| MAPT- | 19 mer | 2598-2675 | GCAUCGACAUGGUAGACUC | 1128 |
| 2598 | sense | (Hs-Mf) | | |
| | strand | | | |
| MAPT- | 19 mer | 2657-2734 | CUGGCCAAGCAGGGUUUGU | 1129 |
| 2657 | sense | (Hs-Mf) | | |
| | strand | | | |
| MAPT- | 19 mer | 2723-2800 | AGAGUGUGGAAAAAAAAAG | 1130 |
| 2723 | sense | (Hs-Mf) | | |
| | strand | | | |
| MAPT- | 19 mer | 2724-2801 | GAGUGUGGAAAAAAAAAGA | 1131 |
| 2724 | sense | (Hs-Mf) | | |
| | strand | | | |
| MAPT- | 19 mer | 2726-2803 | GUGUGGAAAAAAAAAGAAU | 1132 |
| 2726 | sense | (Hs-Mf) | | |
| | strand | | | |
| MAPT- | 19 mer | 2784-2860- | GCAGUUCGGUUAAUUGGUU | 1133 |
| 2784 | sense | 1 mismatch | | |
| | strand | (Hs-Mf) | | |
| MAPT- | 19 mer | 2963-3039 | GGCAAUUCCUUUUGAUUCU | 1134 |
| 2963 | sense | (Hs-Mf) | | |
| | strand | | | |
| MAPT- | 19 mer | 3110-3186 | AGCAACAAAGGAUUUGAAA | 1135 |
| 3110 | sense | (Hs-Mf) | | |
| | strand | | | |
| MAPT- | 19 mer | 3114-3190 | ACAAAGGAUUUGAAACUUG | 1136 |
| 3114 | sense | (Hs-Mf) | | |
| | strand | | | |
| MAPT- | 19 mer | 3116-3192 | AAAGGAUUUGAAACUUGGU | 1137 |
| 3116 | sense | (Hs-Mf) | | |
| | strand | | | |
| MAPT- | 19 mer | 3118-3194 | AGGAUUUGAAACUUGGUGU | 1138 |
| 3118 | sense | (Hs-Mf) | | |
| | strand | | | |
| MAPT- | 19 mer | 3158-3234 | CGAUGUCAACCUUGUGUGA | 1139 |
| 3158 | sense | (Hs-Mf) | | |
| | strand | | | |
| MAPT- | 19 mer | 3503-3576 | AAAGACUGACCUUGAUGUC | 1140 |
| 3503 | sense | (Hs-Mf) | | |
| | strand | | | |
| MAPT- | 19 mer | 3589-3661 | CUCCACAGAAACCCUGUUU | 1141 |
| 3589 | sense | (Hs-Mf) | | |
| | strand | | | |
| MAPT- | 19 mer | 3591-3663 | CCACAGAAACCCUGUUUUA | 1142 |
| 3591 | sense | (Hs-Mf) | | |
| | strand | | | |
| MAPT- | 19 mer | 3592-3664 | CACAGAAACCCUGUUUUAU | 1143 |
| 3592 | sense | (Hs-Mf) | | |
| | strand | | | |
| MAPT- | 19 mer | 3593-3665 | ACAGAAACCCUGUUUUAUU | 1144 |
| 3593 | sense | (Hs-Mf) | | |
| | strand | | | |
| MAPT- | 19 mer | 3594-3666 | CAGAAACCCUGUUUUAUUG | 1145 |
| 3594 | sense | (Hs-Mf) | | |
| | strand | | | |
| MAPT- | 19 mer | 3595-3667 | AGAAACCCUGUUUUAUUGA | 1146 |
| 3595 | sense | (Hs-Mf) | | |
| | strand | | | |
| MAPT- | 19 mer | 3596-3668 | GAAACCCUGUUUUAUUGAG | 1147 |
| 3596 | sense | (Hs-Mf) | | |
| | strand | | | |
| MAPT- | 19 mer | 3597-3669 | AAACCCUGUUUUAUUGAGU | 1148 |
| 3597 | sense | (Hs-Mf) | | |
| | strand | | | |
| MAPT- | 19 mer | 3598-3670 | AACCCUGUUUUAUUGAGUU | 1149 |
| 3598 | sense | (Hs-Mf) | | |
| | strand | | | |
| MAPT- | 19 mer | 3599-3671 | ACCCUGUUUUAUUGAGUUC | 1150 |
| 3599 | sense | (Hs-Mf) | | |
| | strand | | | |
| MAPT- | 19 mer | 3600-3672 | CCCUGUUUUAUUGAGUUCU | 1151 |
| 3600 | sense | (Hs-Mf) | | |
| | strand | | | |
| MAPT- | 19 mer | 3601-3673 | CCUGUUUUAUUGAGUUCUG | 1152 |
| 3601 | sense | (Hs-Mf) | | |
| | strand | | | |
| MAPT- | 19 mer | 3602-3674 | CUGUUUUAUUGAGUUCUGA | 1153 |
| 3602 | sense | (Hs-Mf) | | |
| | strand | 3603-3675 | | |
| MAPT- | 19 mer | | UGUUUUAUUGAGUUCUGAA | 1154 |
| 3603 | sense | (Hs-Mf) | | |
| | strand | | | |
| MAPT- | 19 mer | 3605-3677 | UUUUAUUGAGUUCUGAAGG | 1155 |
| 3605 | sense | (Hs-Mf) | | |
| | strand | | | |
| MAPT- | 19 mer | 3607-3679 | UUAUUGAGUUCUGAAGGUU | 1156 |
| 3607 | sense | (Hs-Mf) | | |
| | strand | | | |
| MAPT- | 19 mer | 3609-3681 | AUUGAGUUCUGAAGGUUGG | 1157 |
| 3609 | sense | (Hs-Mf) | | |
| | strand | | | |
| MAPT- | 19 mer | 3610-3682 | UUGAGUUCUGAAGGUUGGA | 1158 |
| 3610 | sense | (Hs-Mf) | | |
| | strand | | | |
| MAPT- | 19 mer | 3677-3749 | AACCAGUUCUCUUUGUAAG | 1159 |
| 3677 | sense | (Hs-Mf) | | |
| | strand | | | |
| MAPT- | 19 mer | 3678-3750 | ACCAGUUCUCUUUGUAAGG | 1160 |
| 3678 | sense | (Hs-Mf) | | |
| | strand | | | |
| MAPT- | 19 mer | 3679-3751 | CCAGUUCUCUUUGUAAGGA | 1161 |
| 3679 | sense | (Hs-Mf) | | |
| | strand | | | |
| MAPT- | 19 mer | 3680-3752 | CAGUUCUCUUUGUAAGGAC | 1162 |
| 3680 | sense | (Hs-Mf) | | |
| | strand | | | |
| MAPT- | 19 mer | 3958-4030 | CUACUCCAUACUGAGGGUG | 1163 |
| 3958 | sense | (Hs-Mf) | | |
| | strand | | | |
| MAPT- | 19 mer | 3959-4031 | UACUCCAUACUGAGGGUGA | 1164 |
| 3959 | sense | (Hs-Mf) | | |
| | strand | | | |
| MAPT- | 19 mer | 3960-4032 | ACUCCAUACUGAGGGUGAA | 1165 |
| 3960 | sense | (Hs-Mf) | | |
| | strand | | | |
| MAPT- | 19 mer | 3961-4033 | CUCCAUACUGAGGGUGAAA | 1166 |
| 3961 | sense | (Hs-Mf) | | |
| | strand | | | |
| MAPT- | 19 mer | 3965-4037 | AUACUGAGGGUGAAAUUAA | 1167 |
| 3965 | sense | (Hs-Mf) | | |
| | strand | | | |
| MAPT- | 19 mer | 3970-4042 | GAGGGUGAAAUUAAGGGAA | 1168 |
| 3970 | sense | (Hs-Mf) | | |
| | strand | | | |
| MAPT- | 19 mer | 4146-4218 | GGUGUUUCUGCCUUGUUGA | 1169 |
| 4146 | sense | (Hs-Mf) | | |
| | strand | | | |
| MAPT- | 19 mer | 4474-4545 | CUGGAGCAGCUGAACAUAU | 1170 |
| 4474 | sense | (Hs-Mf) | | |
| | strand | | | |
| MAPT- | 19 mer | 4475-4546 | UGGAGCAGCUGAACAUAUA | 1171 |
| 4475 | sense | (Hs-Mf) | | |
| | strand | | | |
| MAPT- | 19 mer | 4477-4548 | GAGCAGCUGAACAUAUACA | 1172 |
| 4477 | sense | (Hs-Mf) | | |
| | strand | | | |
| MAPT- | 19 mer | 4478-4549 | AGCAGCUGAACAUAUACAU | 1173 |
| 4478 | sense | (Hs-Mf) | | |
| | strand | | | |
| MAPT- | 19 mer | 4479-4550 | GCAGCUGAACAUAUACAUA | 1174 |
| 4479 | sense | (Hs-Mf) | | |
| | strand | | | |
| MAPT- | 19 mer | 4480-4551 | CAGCUGAACAUAUACAUAG | 1175 |
| 4480 | sense | (Hs-Mf) | | |
| | strand | | | |
| MAPT- | 19 mer | 4481-4552 | AGCUGAACAUAUACAUAGA | 1176 |
| 4481 | sense | (Hs-Mf) | | |
| | strand | | | |
| MAPT- | 19 mer | 4482-4553 | GCUGAACAUAUACAUAGAU | 1177 |
| 4482 | sense | (Hs-Mf) | | |
| | strand | | | |
| MAPT- | 19 mer | 4485-4556 | GAACAUAUACAUAGAUGUU | 1178 |
| 4485 | sense | (Hs-Mf) | | |
| | strand | | | |
| MAPT- | 19 mer | 4486-4557 | AACAUAUACAUAGAUGUUG | 1179 |
| 4486 | sense | (Hs-Mf) | | |
| | strand | | | |
| MAPT- | 19 mer | 4532 (Hs) | GAGUUGUAGUUGGAUUUGU | 1180 |
| 4532 | sense | | | |
| | strand | | | |
| MAPT- | 19 mer | 4533 (Hs) | AGUUGUAGUUGGAUUUGUC | 1181 |
| 4533 | sense | | | |
| | strand | | | |
| MAPT- | 19 mer | 4539-4610 | AGUUGGAUUUGUCUGUUUA | 1182 |
| 4539 | sense | (Hs-Mf) | | |
| | strand | | | |
| MAPT- | 19 mer | 4540-4611 | GUUGGAUUUGUCUGUUUAU | 1183 |
| 4540 | sense | (Hs-Mf) | | |
| | strand | | | |
| MAPT- | 19 mer | 4541-4612 | UUGGAUUUGUCUGUUUAUG | 1184 |
| 4541 | sense | (Hs-Mf) | | |
| | strand | | | |
| MAPT- | 19 mer | 4543-4614 | GGAUUUGUCUGUUUAUGCU | 1185 |
| 4543 | sense | (Hs-Mf) | | |
| | strand | | | |
| MAPT- | 19 mer | 4544-4615 | GAUUUGUCUGUUUAUGCUU | 1186 |
| 4544 | sense | (Hs-Mf) | | |
| | strand | | | |
| MAPT- | 19 mer | 4545-4616 | AUUUGUCUGUUUAUGCUUG | 1187 |
| 4545 | sense | (Hs-Mf) | | |
| | strand | | | |
| MAPT- | 19 mer | 4546-4617 | UUUGUCUGUUUAUGCUUGG | 1188 |
| 4546 | sense | (Hs-Mf) | | |
| | strand | | | |
| MAPT- | 19 mer | 4547-4618 | UUGUCUGUUUAUGCUUGGA | 1189 |
| 4547 | sense | (Hs-Mf) | | |
| | strand | | | |
| MAPT- | 19 mer | 4548-4619 | UGUCUGUUUAUGCUUGGAU | 1190 |
| 4548 | sense | (Hs-Mf) | | |
| | strand | | | |
| MAPT- | 19 mer | 4549-4620 | GUCUGUUUAUGCUUGGAUU | 1191 |
| 4549 | sense | (Hs-Mf) | | |
| | strand | | | |
| MAPT- | 19 mer | 4550-4621 | UCUGUUUAUGCUUGGAUUC | 1192 |
| 4550 | sense | (Hs-Mf) | | |
| | strand | | | |
| MAPT- | 19 mer | 4551-4622 | CUGUUUAUGCUUGGAUUCA | 1193 |
| 4551 | sense | (Hs-Mf) | | |
| | strand | | | |
| MAPT- | 19 mer | 4552-4623 | UGUUUAUGCUUGGAUUCAC | 1194 |
| 4552 | sense | (Hs-Mf) | | |
| | strand | | | |
| MAPT- | 19 mer | 4554-4625 | UUUAUGCUUGGAUUCACCA | 1195 |
| 4554 | sense | (Hs-Mf) | | |
| | strand | | | |
| MAPT- | 19 mer | 4556-4627 | UAUGCUUGGAUUCACCAGA | 1196 |
| 4556 | sense | (Hs-Mf) | | |
| | strand | | | |
| MAPT- | 19 mer | 4557-4628 | AUGCUUGGAUUCACCAGAG | 1197 |
| 4557 | sense | (Hs-Mf) | | |
| | strand | | | |
| MAPT- | 19 mer | 4558-4629 | UGCUUGGAUUCACCAGAGU | 1198 |
| 4558 | sense | (Hs-Mf) | | |
| | strand | | | |
| MAPT- | 19 mer | 4559-4630 | GCUUGGAUUCACCAGAGUG | 1199 |
| 4559 | sense | (Hs-Mf) | | |
| | strand | | | |
| MAPT- | 19 mer | 4560-4631 | CUUGGAUUCACCAGAGUGA | 1200 |
| 4560 | sense | (Hs-Mf) | | |
| | strand | | | |
| MAPT- | 19 mer | 4561-4632 | UUGGAUUCACCAGAGUGAC | 1201 |
| 4561 | sense | (Hs-Mf) | | |
| | strand | | | |
| MAPT- | 19 mer | 4562-4633 | UGGAUUCACCAGAGUGACU | 1202 |
| 4562 | sense | (Hs-Mf) | | |
| | strand | | | |
| MAPT- | 19 mer | 4563-4634 | GGAUUCACCAGAGUGACUA | 1203 |
| 4563 | sense | (Hs-Mf) | | |
| | strand | | | |
| MAPT- | 19 mer | 4564-4635 | GAUUCACCAGAGUGACUAU | 1204 |
| 4564 | sense | (Hs-Mf) | | |
| | strand | | | |
| MAPT- | 19 mer | 4615-4687 | ACGCAUGUAUCUUGAAAUG | 1205 |
| 4615 | sense | (Hs-Mf) | | |
| | strand | | | |
| MAPT- | 19 mer | 4616-4688 | CGCAUGUAUCUUGAAAUGC | 1206 |
| 4616 | sense | (Hs-Mf) | | |
| | strand | | | |
| MAPT- | 19 mer | 4617-4689 | GCAUGUAUCUUGAAAUGCU | 1207 |
| 4617 | sense | (Hs-Mf) | | |
| | strand | | | |
| MAPT- | 19 mer | 4618-4690 | CAUGUAUCUUGAAAUGCUU | 1208 |
| 4618 | sense | (Hs-Mf) | | |
| | strand | | | |
| MAPT- | 19 mer | 4619-4691 | AUGUAUCUUGAAAUGCUUG | 1209 |
| 4619 | sense | (Hs-Mf) | | |
| | strand | | | |
| MAPT- | 19 mer | 4620-4692 | UGUAUCUUGAAAUGCUUGU | 1210 |
| 4620 | sense | (Hs-Mf) | | |
| | strand | | | |
| MAPT- | 19 mer | 4621-4693 | GUAUCUUGAAAUGCUUGUA | 1211 |
| 4621 | sense | (Hs-Mf) | | |
| | strand | | | |
| MAPT- | 19 mer | 4622-4694 | UAUCUUGAAAUGCUUGUAA | 1212 |
| 4622 | sense | (Hs-Mf) | | |
| | strand | | | |
| MAPT- | 19 mer | 4623-4695 | AUCUUGAAAUGCUUGUAAA | 1213 |
| 4623 | sense | (Hs-Mf) | | |
| | strand | | | |
| MAPT- | 19 mer | 4625-4697 | CUUGAAAUGCUUGUAAAGA | 1214 |
| 4625 | sense | (Hs-Mf) | | |
| | strand | | | |
| MAPT- | 19 mer | 4627-4699 | UGAAAUGCUUGUAAAGAGG | 1215 |
| 4627 | sense | (Hs-Mf) | | |
| | strand | | | |
| MAPT- | 19 mer | 4628-4700 | GAAAUGCUUGUAAAGAGGU | 1216 |
| 4628 | sense | (Hs-Mf) | | |
| | strand | | | |
| MAPT- | 19 mer | 4629-4701 | AAAUGCUUGUAAAGAGGUU | 1217 |
| 4629 | sense | (Hs-Mf) | | |
| | strand | | | |
| MAPT- | 19 mer | 4630-4702 | AAUGCUUGUAAAGAGGUUU | 1218 |
| 4630 | sense | (Hs-Mf) | | |
| | strand | | | |
| MAPT- | 19 mer | 4632-4704 | UGCUUGUAAAGAGGUUUCU | 1219 |
| 4632 | sense | (Hs-Mf) | | |
| | strand | | | |
| MAPT- | 19 mer | 4633-4705 | GCUUGUAAAGAGGUUUCUA | 1220 |
| 4633 | sense | (Hs-Mf) | | |
| | strand | | | |
| MAPT- | 19 mer | 4825-4897 | ACAGGAUUAGGACUGAAGC | 1221 |
| 4825 | sense | (Hs-Mf) | | |
| | strand | | | |
| MAPT- | 19 mer | 4828-4900 | GGAUUAGGACUGAAGCGAU | 1222 |
| 4828 | sense | (Hs-Mf) | | |
| | strand | | | |
| MAPT- | 19 mer | 5682-5743 | GAAGUUCUUGUGCCCUGCU | 1223 |
| 5682 | sense | (Hs-Mf) | | |
| | strand | | | |
| MAPT- | 19 mer | 5958 (Hs) | AAGCUGCUGACUCACUUUA | 1224 |
| 5958 | sense | | | |
| | strand | | | |
| MAPT- | 19 mer | 5959 (Hs) | AGCUGCUGACUCACUUUAU | 1225 |
| 5959 | sense | | | |
| | strand | | | |
| MAPT- | 19 mer | 5961 (Hs) | CUGCUGACUCACUUUAUCA | 1226 |
| 5961 | sense | | | |
| | strand | | | |
| MAPT- | 19 mer | 5963 (Hs) | GCUGACUCACUUUAUCAAU | 1227 |
| 5963 | sense | | | |
| | strand | | | |
| MAPT- | 19 mer | 5964 (Hs) | CUGACUCACUUUAUCAAUA | 1228 |
| 5964 | sense | | | |
| | strand | | | |
| MAPT- | 19 mer | 5965 (Hs) | UGACUCACUUUAUCAAUAG | 1229 |
| 5965 | sense | | | |
| | strand | | | |
| MAPT- | 19 mer | 5966-6021 | GACUCACUUUAUCAAUAGU | 1230 |
| 5966 | sense | (Hs-Mf) | | |
| | strand | | | |
| MAPT- | 19 mer | 5967-6022 | ACUCACUUUAUCAAUAGUU | 1231 |
| 5967 | sense | (Hs-Mf) | | |
| | strand | | | |
| MAPT- | 19 mer | 5968-6023 | CUCACUUUAUCAAUAGUUC | 1232 |
| 5968 | sense | (Hs-Mf) | | |
| | strand | | | |
| MAPT- | 19 mer | 6006-6061 | GGUGAGACUGUAUCCUGUU | 1233 |
| 6006 | sense | (Hs-Mf) | | |
| | strand | | | |
| MAPT- | 19 mer | 6007-6062 | GUGAGACUGUAUCCUGUUU | 1234 |
| 6007 | sense | (Hs-Mf) | | |
| | strand | | | |
| MAPT- | 19 mer | 6008-6063 | UGAGACUGUAUCCUGUUUG | 1235 |
| 6008 | sense | (Hs-Mf) | | |
| | strand | | | |
| MAPT- | 19 mer | 6009-6064 | GAGACUGUAUCCUGUUUGC | 1236 |
| 6009 | sense | (Hs-Mf) | | |
| | strand | | | |
| MAPT- | 19 mer | 6010-6065 | AGACUGUAUCCUGUUUGCU | 1237 |
| 6010 | sense | (Hs-Mf) | | |
| | strand | | | |
| MAPT- | 19 mer | 6011-6066 | GACUGUAUCCUGUUUGCUA | 1238 |
| 6011 | sense | (Hs-Mf) | | |
| | strand | | | |
| MAPT- | 19 mer | 6012-6067 | ACUGUAUCCUGUUUGCUAU | 1239 |
| 6012 | sense | (Hs-Mf) | | |
| | strand | | | |
| MAPT- | 19 mer | 6013-6068 | CUGUAUCCUGUUUGCUAUU | 1240 |
| 6013 | sense | (Hs-Mf) | | |
| | strand | | | |
| MAPT- | 19 mer | 6014-6069 | UGUAUCCUGUUUGCUAUUG | 1241 |
| 6014 | sense | (Hs-Mf) | | |
| | strand | | | |
| MAPT- | 19 mer | 6015-6070 | GUAUCCUGUUUGCUAUUGC | 1242 |
| 6015 | sense | (Hs-Mf) | | |
| | strand | | | |
| MAPT- | 19 mer | 6017-6072 | AUCCUGUUUGCUAUUGCUU | 1243 |
| 6017 | sense | (Hs-Mf) | | |
| | strand | | | |
| MAPT- | 19 mer | 6119-6174 | GCCUCGUAACCCUUUUCAU | 1244 |
| 6119 | sense | (Hs-Mf) | | |
| | strand | | | |
| MAPT- | 19 mer | 6628-6689 | GAGUUUGCCAUGUUGAGCA | 1245 |
| 6628 | sense | (Hs-Mf) | | |
| | strand | | | |
| MAPT- | 19 mer | 6629-6690 | AGUUUGCCAUGUUGAGCAG | 1246 |
| 6629 | sense | (Hs-Mf) | | |
| | strand | | | |
| MAPT- | 19 mer | 6631-6692 | UUUGCCAUGUUGAGCAGGA | 1247 |
| 6631 | sense | (Hs-Mf) | | |
| | strand | | | |
| MAPT- | 19 mer | 6672-6733 | CCAUGAUUUCUUCGGUAAU | 1248 |
| 6672 | sense | (Hs-Mf) | | |
| | strand | | | |
| MAPT- | 19 mer | 6731 (Hs) | GCUUUCUGUCUGUGAAUGU | 1249 |
| 6731 | sense | | | |
| | strand | | | |
| MAPT- | 19 mer | 6732 (Hs) | CUUUCUGUCUGUGAAUGUC | 1250 |
| 6732 | sense | | | |
| | strand | | | |
| MAPT- | 19 mer | 6738-6799 | GUCUGUGAAUGUCUAUAUA | 1251 |
| 6738 | sense | (Hs-Mf) | | |
| | strand | | | |
| MAPT- | 19 mer | 6739-6800 | UCUGUGAAUGUCUAUAUAG | 1252 |
| 6739 | sense | (Hs-Mf) | | |
| | strand | | | |
| MAPT- | 19 mer | 6740-6801 | CUGUGAAUGUCUAUAUAGU | 1253 |
| 6740 | sense | (Hs-Mf) | | |
| | strand | | | |
| MAPT- | 19 mer | 6741-6802 | UGUGAAUGUCUAUAUAGUG | 1254 |
| 6741 | sense | (Hs-Mf) | | |
| | strand | | | |
| MAPT- | 19 mer | 6742-6803 | GUGAAUGUCUAUAUAGUGU | 1255 |
| 6742 | sense | (Hs-Mf) | | |
| | strand | | | |
| MAPT- | 19 mer | 6743-6804 | UGAAUGUCUAUAUAGUGUA | 1256 |
| 6743 | sense | (Hs-Mf) | | |
| | strand | | | |
| MAPT- | 19 mer | 6745-6806 | AAUGUCUAUAUAGUGUAUU | 1257 |
| 6745 | sense | (Hs-Mf) | | |
| | strand | | | |
| MAPT- | 19 mer | 6748-6809 | GUCUAUAUAGUGUAUUGUG | 1258 |
| 6748 | sense | (Hs-Mf) | | |
| | strand | | | |
| MAPT- | 19 mer | 6749-6810 | UCUAUAUAGUGUAUUGUGU | 1259 |
| 6749 | sense | (Hs-Mf) | | |
| | strand | | | |
| MAPT- | 19 mer | 6750-6811 | CUAUAUAGUGUAUUGUGUG | 1260 |
| 6750 | sense | (Hs-Mf) | | |
| | strand | | | |
| MAPT- | 19 mer | 6751-6812 | UAUAUAGUGUAUUGUGUGU | 1261 |
| 6751 | sense | (Hs-Mf) | | |
| | strand | | | |
| MAPT- | 19 mer | 6752-6813 | AUAUAGUGUAUUGUGUGUU | 1262 |
| 6752 | sense | (Hs-Mf) | | |
| | strand | | | |
| MAPT- | 19 mer | 6753-6814 | UAUAGUGUAUUGUGUGUUU | 1263 |
| 6753 | sense | (Hs-Mf) | | |
| | strand | | | |
| MAPT- | 19 mer | 6754-6815 | AUAGUGUAUUGUGUGUUUU | 1264 |
| 6754 | sense | (Hs-Mf) | | |
| | strand | | | |
| MAPT- | 19 mer | 6755-6816 | UAGUGUAUUGUGUGUUUUA | 1265 |
| 6755 | sense | (Hs-Mf) | | |
| | strand | | | |
| MAPT- | 19 mer | 6756-6817 | AGUGUAUUGUGUGUUUUAA | 1266 |
| 6756 | sense | (Hs-Mf) | | |
| | strand | | | |
| MAPT- | 19 mer | 6757-6818 | GUGUAUUGUGUGUUUUAAC | 1267 |
| 6757 | sense | (Hs-Mf) | | |
| | strand | | | |
| MAPT- | 19 mer | 6758-6819 | UGUAUUGUGUGUUUUAACA | 1268 |
| 6758 | sense | (Hs-Mf) | | |
| | strand | | | |
| MAPT- | 19 mer | 6759-6820 | GUAUUGUGUGUUUUAACAA | 1269 |
| 6759 | sense | (Hs-Mf) | | |
| | strand | | | |
| MAPT- | 19 mer | 6760-6821 | UAUUGUGUGUUUUAACAAA | 1270 |
| 6760 | sense | (Hs-Mf) | | |
| | strand | | | |
| MAPT- | 19 mer | 6761-6822 | AUUGUGUGUUUUAACAAAU | 1271 |
| 6761 | sense | (Hs-Mf) | | |
| | strand | | | |
| MAPT- | 19 mer | 6762-6823 | UUGUGUGUUUUAACAAAUG | 1272 |
| 6762 | sense | (Hs-Mf) | | |
| | strand | | | |
| MAPT- | 19 mer | 6763-6824 | UGUGUGUUUUAACAAAUGA | 1273 |
| 6763 | sense | (Hs-Mf) | | |
| | strand | | | |
| MAPT- | 19 mer | 6764-6825 | GUGUGUUUUAACAAAUGAU | 1274 |
| 6764 | sense | (Hs-Mf) | | |
| | strand | | | |
| MAPT- | 19 mer | 6765-6826 | UGUGUUUUAACAAAUGAUU | 1275 |
| 6765 | sense | (Hs-Mf) | | |
| | strand | | | |
| MAPT- | 19 mer | 6766-6827 | GUGUUUUAACAAAUGAUUU | 1276 |
| 6766 | sense | (Hs-Mf) | | |
| | strand | | | |
| MAPT- | 19 mer | 6767-6828 | UGUUUUAACAAAUGAUUUA | 1277 |
| 6767 | sense | (Hs-Mf) | | |
| | strand | | | |
| MAPT- | 19 mer | 6768-6829 | GUUUUAACAAAUGAUUUAC | 1278 |
| 6768 | sense | (Hs-Mf) | | |
| | strand | | | |
| MAPT- | 19 mer | 6769-6830 | UUUUAACAAAUGAUUUACA | 1279 |
| 6769 | sense | (Hs-Mf) | | |
| | strand | | | |
| MAPT- | 19 mer | 6772-6833 | UAACAAAUGAUUUACACUG | 1280 |
| 6772 | sense | (Hs-Mf) | | |
| | strand | | | |
| MAPT- | 19 mer | 6773-6834 | AACAAAUGAUUUACACUGA | 1281 |
| 6773 | sense | (Hs-Mf) | | |
| | strand | | | |
| MAPT- | 19 mer | 6774-6835 | ACAAAUGAUUUACACUGAC | 1282 |
| 6774 | sense | (Hs-Mf) | | |
| | strand | | | |
| MAPT- | 19 mer | 6775-6836 | CAAAUGAUUUACACUGACU | 1283 |
| 6775 | sense | (Hs-Mf) | | |
| | strand | | | |
| MAPT- | 19 mer | 6777-6838 | AAUGAUUUACACUGACUGU | 1284 |
| 6777 | sense | (Hs-Mf) | | |
| | strand | | | |
| MAPT- | 19 mer | 6778-6839 | AUGAUUUACACUGACUGUU | 1285 |
| 6778 | sense | (Hs-Mf) | | |
| | strand | | | |
| MAPT- | 19 mer | 6779-6840 | UGAUUUACACUGACUGUUG | 1286 |
| 6779 | sense | (Hs-Mf) | | |
| | strand | | | |
| MAPT- | 19 mer | 6780-6841 | GAUUUACACUGACUGUUGC | 1287 |
| 6780 | sense | (Hs-Mf) | | |
| | strand | | | |
| MAPT- | 19 mer | 6781 (Hs) | AUUUACACUGACUGUUGCU | 1288 |
| 6781 | sense | | | |
| | strand | | | |
| MAPT- | 19 mer | 6789 (Hs) | UGACUGUUGCUGUAAAAGU | 1289 |
| 6789 | sense | | | |
| | strand | | | |
| MAPT- | 19 mer | 6792 (Hs) | CUGUUGCUGUAAAAGUGAA | 1290 |
| 6792 | sense | | | |
| | strand | | | |
| MAPT- | 19 mer | 6793 (Hs) | UGUUGCUGUAAAAGUGAAU | 1291 |
| 6793 | sense | | | |
| | strand | | | |
| MAPT- | 19 mer | 6795 (Hs) | UUGCUGUAAAAGUGAAUUU | 1292 |
| 6795 | sense | | | |
| | strand | | | |
| MAPT- | 19 mer | 6796 (Hs) | UGCUGUAAAAGUGAAUUUG | 1293 |
| 6796 | sense | | | |
| | strand | | | |
| MAPT- | 19 mer | 6797 (Hs) | GCUGUAAAAGUGAAUUUGG | 1294 |
| 6797 | sense | | | |
| | strand | | | |
| MAPT- | 19 mer | 6798 (Hs) | CUGUAAAAGUGAAUUUGGA | 1295 |
| 6798 | sense | | | |
| | strand | | | |
| MAPT- | 19 mer | 2141-2218- | GCUGGUGCUUCAGGUUCUC | 1296 |
| 2141 | anti- | 966 (Hs- | | |
| | sense | Mf-Mm) | | |
| | strand | | | |
| MAPT- | 19 mer | 2142-2219- | GGCUGGUGCUUCAGGUUCU | 1297 |
| 2142 | anti- | 967 (Hs- | | |
| | sense | Mf-Mm) | | |
| | strand | | | |
| MAPT- | 19 mer | 2303-2380- | AGCCACACUUGGAGGUCAC | 1298 |
| 2303 | anti- | 1128 (Hs- | | |
| | sense | Mf-Mm) | | |
| | strand | | | |
| MAPT- | 19 mer | 2347-2424- | UUCCACCUGGCCACCUCCU | 1299 |
| 2347 | anti- | 1172 (Hs- | | |
| | sense | Mf-Mm) | | |
| | strand | | | |
| MAPT- | 19 mer | 2349-2426- | ACUUCCACCUGGCCACCUC | 1300 |
| 2349 | anti- | 1174 (Hs- | | |
| | sense | Mf-Mm) | | |
| | strand | | | |
| MAPT- | 19 mer | 2350-2427- | UACUUCCACCUGGCCACCU | 1301 |
| 2350 | anti- | 1175 (Hs- | | |
| | sense | Mf-Mm) | | |
| | strand | | | |
| MAPT- | 19 mer | 2351-2428- | UUACUUCCACCUGGCCACC | 1302 |
| 2351 | anti- | 1176 (Hs- | | |
| | sense | Mf-Mm) | | |
| | strand | | | |
| MAPT- | 19 mer | 2352-2429- | UUUACUUCCACCUGGCCAC | 1303 |
| 2352 | anti- | 1177 (Hs- | | |
| | sense | Mf-Mm) | | |
| | strand | | | |
| MAPT- | 19 mer | 2353-2430- | UUUUACUUCCACCUGGCCA | 1304 |
| 2353 | anti- | 1178 (Hs- | | |
| | sense | Mf-Mm) | | |
| | strand | | | |
| MAPT- | 19 mer | 2354-2431- | AUUUUACUUCCACCUGGCC | 1305 |
| 2354 | anti- | 1179 (Hs- | | |
| | sense | Mf-Mm) | | |
| | strand | | | |
| MAPT- | 19 mer | 2355-2432- | GAUUUUACUUCCACCUGGC | 1306 |
| 2355 | anti- | 1180 (Hs- | | |
| | sense | Mf-Mm) | | |
| | strand | | | |
| MAPT- | 19 mer | 2459-2536- | GCUUGUGGGUUUCAAUCUU | 1307 |
| 2459 | anti- | 1284 (Hs- | | |
| | sense | Mf-Mm) | | |
| | strand | | | |
| MAPT- | 19 mer | 2460-2537- | AGCUUGUGGGUUUCAAUCU | 1308 |
| 2460 | anti- | 1285 (Hs- | | |
| | sense | Mf-Mm) | | |
| | strand | | | |
| MAPT- | 19 mer | 2461-2538- | CAGCUUGUGGGUUUCAAUC | 1309 |
| 2461 | anti- | 1286 (Hs- | | |
| | sense | Mf-Mm) | | |
| | strand | | | |
| MAPT- | 19 mer | 2462-2539- | UCAGCUUGUGGGUUUCAAU | 1310 |
| 2462 | anti- | 1287 (Hs- | | |
| | sense | Mf-Mm) | | |
| | strand | | | |
| MAPT- | 19 mer | 2463-2540- | GUCAGCUUGUGGGUUUCAA | 1311 |
| 2463 | anti- | 1288 (Hs- | | |
| | sense | Mf-Mm) | | |
| | strand | | | |
| MAPT- | 19 mer | 2464-2541- | GGUCAGCUUGUGGGUUUCA | 1312 |
| 2464 | anti- | 1289 (Hs- | | |
| | sense | Mf-Mm) | | |
| | strand | | | |
| MAPT- | 19 mer | 2465-2542- | AGGUCAGCUUGUGGGUUUC | 1313 |
| 2465 | anti- | 1290 (Hs- | | |
| | sense | Mf-Mm) | | |
| | strand | | | |
| MAPT- | 19 mer | 2466-2543- | AAGGUCAGCUUGUGGGUUU | 1314 |
| 2466 | anti- | 1291 (Hs- | | |
| | sense | Mf-Mm) | | |
| | strand | | | |
| MAPT- | 19 mer | 2467-2544- | GAAGGUCAGCUUGUGGGUU | 1315 |
| 2467 | anti- | 1292 (Hs- | | |
| | sense | Mf-Mm) | | |
| | strand | | | |
| MAPT- | 19 mer | 2495-2572- | GGUCUGUCUUGGCUUUGGC | 1316 |
| 2495 | anti- | 1320 (Hs- | | |
| | sense | Mf-Mm) | | |
| | strand | | | |
| MAPT- | 19 mer | 2496-2573- | UGGUCUGUCUUGGCUUUGG | 1317 |
| 2496 | anti- | 1321 (Hs- | | |
| | sense | Mf-Mm) | | |
| | strand | | | |
| MAPT- | 19 mer | 3686-3758- | GCACAAGUCCUUACAAAGA | 1318 |
| 3686 | anti- | 2505 (Hs- | | |
| | sense | Mf-Mm) | | |
| | strand | | | |
| MAPT- | 19 mer | 3687-3759- | GGCACAAGUCCUUACAAAG | 1319 |
| 3687 | anti- | 2506 (Hs- | | |
| | sense | Mf-Mm) | | |
| | strand | | | |
| MAPT- | 19 mer | 3688-3760- | AGGCACAAGUCCUUACAAA | 1320 |
| 3688 | anti- | 2507 (Hs- | | |
| | sense | Mf-Mm) | | |
| | strand | | | |
| MAPT- | 19 mer | 3691-3763- | AAGAGGCACAAGUCCUUAC | 1321 |
| 3691 | anti- | 2510 (Hs- | | |
| | sense | Mf-Mm) | | |
| | strand | | | |
| MAPT- | 19 mer | 3692-3764- | CAAGAGGCACAAGUCCUUA | 1322 |
| 3692 | anti- | 2511 (Hs- | | |
| | sense | Mf-Mm) | | |
| | strand | | | |
| MAPT- | 19 mer | 3693-3765- | CCAAGAGGCACAAGUCCUU | 1323 |
| 3693 | anti- | 2512 (Hs- | | |
| | sense | Mf-Mm) | | |
| | strand | | | |
| MAPT- | 19 mer | 4534-4605- | AGACAAAUCCAACUACAAC | 1324 |
| 4534 | anti- | 3332 (Hs- | | |
| | sense | Mf-Mm) | | |
| | strand | | | |
| MAPT- | 19 mer | 4535-4606- | CAGACAAAUCCAACUACAA | 1325 |
| 4535 | anti- | 3333 (Hs- | | |
| | sense | Mf-Mm) | | |
| | strand | | | |
| MAPT- | 19 mer | 4536-4607- | ACAGACAAAUCCAACUACA | 1326 |
| 4536 | anti- | 3334 (Hs- | | |
| | sense | Mf-Mm) | | |
| | strand | | | |
| MAPT- | 19 mer | 4537-4608- | AACAGACAAAUCCAACUAC | 1327 |
| 4537 | anti- | 3335 (Hs- | | |
| | sense | Mf-Mm) | | |
| | strand | | | |
| MAPT- | 19 mer | 4538-4609- | AAACAGACAAAUCCAACUA | 1328 |
| 4538 | anti- | 3336 (Hs- | | |
| | sense | Mf-Mm) | | |
| | strand | | | |
| MAPT- | 19 mer | 4566-4637- | UCAUAGUCACUCUGGUGAA | 1329 |
| 4566 | anti- | 3362 (Hs- | | |
| | sense | Mf-Mm) | | |
| | strand | | | |
| MAPT- | 19 mer | 4567-4638- | AUCAUAGUCACUCUGGUGA | 1330 |
| 4567 | anti- | 3363 (Hs- | | |
| | sense | Mf-Mm) | | |
| | strand | | | |
| MAPT- | 19 mer | 4568-4639- | UAUCAUAGUCACUCUGGUG | 1331 |
| 4568 | anti- | 3364 (Hs- | | |
| | sense | Mf-Mm) | | |
| | strand | | | |
| MAPT- | 19 mer | 4569-4640- | CUAUCAUAGUCACUCUGGU | 1332 |
| 4569 | anti- | 3365 (Hs- | | |
| | sense | Mf-Mm) | | |
| | strand | | | |
| MAPT- | 19 mer | 4570-4641- | ACUAUCAUAGUCACUCUGG | 1333 |
| 4570 | anti- | 3366 (Hs- | | |
| | sense | Mf-Mm) | | |
| | strand | | | |
| MAPT- | 19 mer | 4571-4642- | CACUAUCAUAGUCACUCUG | 1334 |
| 4571 | anti- | 3367 (Hs- | | |
| | sense | Mf-Mm) | | |
| | strand | | | |
| MAPT- | 19 mer | 4572-4643- | UCACUAUCAUAGUCACUCU | 1335 |
| 4572 | anti- | 3368 (Hs- | | |
| | sense | Mf-Mm) | | |
| | strand | | | |
| MAPT- | 19 mer | 4573-4644- | UUCACUAUCAUAGUCACUC | 1336 |
| 4573 | anti- | 3369 (Hs- | | |
| | sense | Mf-Mm) | | |
| | strand | | | |
| MAPT- | 19 mer | 4574-4645- | UUUCACUAUCAUAGUCACU | 1337 |
| 4574 | anti- | 3370 (Hs- | | |
| | sense | Mf-Mm) | | |
| | strand | | | |
| MAPT- | 19 mer | 4575-4646- | UUUUCACUAUCAUAGUCAC | 1338 |
| 4575 | anti- | 3371 (Hs- | | |
| | sense | Mf-Mm) | | |
| | strand | | | |
| MAPT- | 19 mer | 4576-4647- | CUUUUCACUAUCAUAGUCA | 1339 |
| 4576 | anti- | 3372 (Hs- | | |
| | sense | Mf-Mm) | | |
| | strand | | | |
| MAPT- | 19 mer | 4577-4648- | UCUUUUCACUAUCAUAGUC | 1340 |
| 4577 | anti- | 3373 (Hs- | | |
| | sense | Mf-Mm) | | |
| | strand | | | |
| MAPT- | 19 mer | 4578-4649- | UUCUUUUCACUAUCAUAGU | 1341 |
| 4578 | anti- | 3374 (Hs- | | |
| | sense | Mf-Mm) | | |
| | strand | | | |
| MAPT- | 19 mer | 4579-4650- | UUUCUUUUCACUAUCAUAG | 1342 |
| 4579 | anti- | 3375 (Hs- | | |
| | sense | Mf-Mm) | | |
| | strand | | | |
| MAPT- | 19 mer | 4580-4651- | UUUUCUUUUCACUAUCAUA | 1343 |
| 4580 | anti- | 3376 (Hs- | | |
| | sense | Mf-Mm) | | |
| | strand | | | |
| MAPT- | 19 mer | 4605-4677- | UACAUGCGUCCUUUUUUUU | 1344 |
| 4605 | anti- | 3439 (Hs- | | |
| | sense | Mf-Mm) | | |
| | strand | | | |
| MAPT- | 19 mer | 4606-4678- | AUACAUGCGUCCUUUUUUU | 1345 |
| 4606 | anti- | 3440 (Hs- | | |
| | sense | Mf-Mm) | | |
| | strand | | | |
| MAPT- | 19 mer | 4607-4679- | GAUACAUGCGUCCUUUUUU | 1346 |
| 4607 | anti- | 3441 (Hs- | | |
| | sense | Mf-Mm) | | |
| | strand | | | |
| MAPT- | 19 mer | 4608-4680- | AGAUACAUGCGUCCUUUUU | 1347 |
| 4608 | anti- | 3442 (Hs- | | |
| | sense | Mf-Mm) | | |
| | strand | | | |
| MAPT- | 19 mer | 4609-4681- | AAGAUACAUGCGUCCUUUU | 1348 |
| 4609 | anti- | 3443 (Hs- | | |
| | sense | Mf-Mm) | | |
| | strand | | | |
| MAPT- | 19 mer | 4610-4682- | CAAGAUACAUGCGUCCUUU | 1349 |
| 4610 | anti- | 3444 (Hs- | | |
| | sense | Mf-Mm) | | |
| | strand | | | |
| MAPT- | 19 mer | 4611-4683- | UCAAGAUACAUGCGUCCUU | 1350 |
| 4611 | anti- | 3445 (Hs- | | |
| | sense | Mf-Mm) | | |
| | strand | | | |
| MAPT- | 19 mer | 4612-4684- | UUCAAGAUACAUGCGUCCU | 1351 |
| 4612 | anti- | 3446 (Hs- | | |
| | sense | Mf-Mm) | | |
| | strand | | | |
| MAPT- | 19 mer | 4613-4685- | UUUCAAGAUACAUGCGUCC | 1352 |
| 4613 | anti- | 3447 (Hs- | | |
| | sense | Mf-Mm) | | |
| | strand | | | |
| MAPT- | 19 mer | 4614-4686- | AUUUCAAGAUACAUGCGUC | 1353 |
| 4614 | anti- | 3448 (Hs- | | |
| | sense | Mf-Mm) | | |
| | strand | | | |
| MAPT- | 19 mer | 5969-6024- | GGAACUAUUGAUAAAGUGA | 1354 |
| 5969 | anti- | 4540 (Hs- | | |
| | sense | Mf-Mm) | | |
| | strand | | | |
| MAPT- | 19 mer | 5970-6025- | UGGAACUAUUGAUAAAGUG | 1355 |
| 5970 | anti- | 4541 (Hs- | | |
| | sense | Mf-Mm) | | |
| | strand | | | |
| MAPT- | 19 mer | 5971-6026- | AUGGAACUAUUGAUAAAGU | 1356 |
| 5971 | anti- | 4542 (Hs- | | |
| | sense | Mf-Mm) | | |
| | strand | | | |
| MAPT- | 19 mer | 5972-6027- | AAUGGAACUAUUGAUAAAG | 1357 |
| 5972 | anti- | 4543 (Hs- | | |
| | sense | Mf-Mm) | | |
| | strand | | | |
| MAPT- | 19 mer | 5973-6028- | AAAUGGAACUAUUGAUAAA | 1358 |
| 5973 | anti- | 4544 (Hs- | | |
| | sense | Mf-Mm) | | |
| | strand | | | |
| MAPT- | 19 mer | 5974-6029- | UAAAUGGAACUAUUGAUAA | 1359 |
| 5974 | anti- | 4545 (Hs- | | |
| | sense | Mf-Mm) | | |
| | strand | | | |
| MAPT- | 19 mer | 5975-6030- | UUAAAUGGAACUAUUGAUA | 1360 |
| 5975 | anti- | 4546 (Hs- | | |
| | sense | Mf-Mm) | | |
| | strand | | | |
| MAPT- | 19 mer | 5976-6031- | UUUAAAUGGAACUAUUGAU | 1361 |
| 5976 | anti- | 4547 (Hs- | | |
| | sense | Mf-Mm) | | |
| | strand | | | |
| MAPT- | 19 mer | 5977-6032- | AUUUAAAUGGAACUAUUGA | 1362 |
| 5977 | anti- | 4548 (Hs- | | |
| | sense | Mf-Mm) | | |
| | strand | | | |
| MAPT- | 19 mer | 5978-6033- | AAUUUAAAUGGAACUAUUG | 1363 |
| 5978 | anti- | 4549 (Hs- | | |
| | sense | Mf-Mm) | | |
| | strand | | | |
| MAPT- | 19 mer | 5979-6034- | CAAUUUAAAUGGAACUAUU | 1364 |
| 5979 | anti- | 4550 (Hs- | | |
| | sense | Mf-Mm) | | |
| | strand | | | |
| MAPT- | 19 mer | 5980-6035- | UCAAUUUAAAUGGAACUAU | 1365 |
| 5980 | anti- | 4551 (Hs- | | |
| | sense | Mf-Mm) | | |
| | strand | | | |
| MAPT- | 19 mer | 5981-6036- | GUCAAUUUAAAUGGAACUA | 1366 |
| 5981 | anti- | 4552 (Hs- | | |
| | sense | Mf-Mm) | | |
| | strand | | | |
| MAPT- | 19 mer | 5982-6037- | AGUCAAUUUAAAUGGAACU | 1367 |
| 5982 | anti- | 4553 (Hs- | | |
| | sense | Mf-Mm) | | |
| | strand | | | |
| MAPT- | 19 mer | 5983-6038- | AAGUCAAUUUAAAUGGAAC | 1368 |
| 5983 | anti- | 4554 (Hs- | | |
| | sense | Mf-Mm) | | |
| | strand | | | |
| MAPT- | 19 mer | 5984-6039- | GAAGUCAAUUUAAAUGGAA | 1369 |
| 5984 | anti- | 4555 (Hs- | | |
| | sense | Mf-Mm) | | |
| | strand | | | |
| MAPT- | 19 mer | 5985-6040- | UGAAGUCAAUUUAAAUGGA | 1370 |
| 5985 | anti- | 4556 (Hs- | | |
| | sense | Mf-Mm) | | |
| | strand | | | |
| MAPT- | 19 mer | 6662-6723- | AAAUCAUGGGACUUGCAAG | 1371 |
| 6662 | anti- | 5230 (Hs- | | |
| | sense | Mf-Mm) | | |
| | strand | | | |
| MAPT- | 19 mer | 6663-6724- | GAAAUCAUGGGACUUGCAA | 1372 |
| 6663 | anti- | 5231 (Hs- | | |
| | sense | Mf-Mm) | | |
| | strand | | | |
| MAPT- | 19 mer | 6664-6725- | AGAAAUCAUGGGACUUGCA | 1373 |
| 6664 | anti- | 5232 (Hs- | | |
| | sense | Mf-Mm) | | |
| | strand | | | |
| MAPT- | 19 mer | 6665-6726- | AAGAAAUCAUGGGACUUGC | 1374 |
| 6665 | anti- | 5233 (Hs- | | |
| | sense | Mf-Mm) | | |
| | strand | | | |
| MAPT- | 19 mer | 6800-6861- | UUUCCAAAUUCACUUUUAC | 1375 |
| 6800 | anti- | 5365 (Hs- | | |
| | sense | Mf-Mm) | | |
| | strand | | | |
| MAPT- | 19 mer | 6801-6862- | AUUUCCAAAUUCACUUUUA | 1376 |
| 6801 | anti- | 5366 (Hs- | | |
| | sense | Mf-Mm) | | |
| | strand | | | |
| MAPT- | 19 mer | 6802-6863- | UAUUUCCAAAUUCACUUUU | 1377 |
| 6802 | anti- | 5367 (Hs- | | |
| | sense | Mf-Mm) | | |
| | strand | | | |
| MAPT- | 19 mer | 6803-6864- | UUAUUUCCAAAUUCACUUU | 1378 |
| 6803 | anti- | 5368 (Hs- | | |
| | sense | Mf-Mm) | | |
| | strand | | | |
| MAPT- | 19 mer | 6804-6865- | UUUAUUUCCAAAUUCACUU | 1379 |
| 6804 | anti- | 5369 (Hs- | | |
| | sense | Mf-Mm) | | |
| | strand | | | |
| MAPT- | 19 mer | 6805-6866- | CUUUAUUUCCAAAUUCACU | 1380 |
| 6805 | anti- | 5370 (Hs- | | |
| | sense | Mf-Mm) | | |
| | strand | | | |
| MAPT- | 19 mer | 6806-6867- | ACUUUAUUUCCAAAUUCAC | 1381 |
| 6806 | anti- | 5371 (Hs- | | |
| | sense | Mf-Mm) | | |
| | strand | | | |
| MAPT- | 19 mer | 6807-6868- | AACUUUAUUUCCAAAUUCA | 1382 |
| 6807 | anti- | 5372 (Hs- | | |
| | sense | Mf-Mm) | | |
| | strand | | | |
| MAPT- | 19 mer | 6808-6869- | UAACUUUAUUUCCAAAUUC | 1383 |
| 6808 | anti- | 5373 (Hs- | | |
| | sense | Mf-Mm) | | |
| | strand | | | |
| MAPT- | 19 mer | 6809-6870- | AUAACUUUAUUUCCAAAUU | 1384 |
| 6809 | anti- | 5374 (Hs- | | |
| | sense | Mf-Mm) | | |
| | strand | | | |
| MAPT- | 19 mer | 6810-6871- | AAUAACUUUAUUUCCAAAU | 1385 |
| 6810 | anti- | 5375 (Hs- | | |
| | sense | Mf-Mm) | | |
| | strand | | | |
| MAPT- | 19 mer | 6811-6872- | UAAUAACUUUAUUUCCAAA | 1386 |
| 6811 | anti- | 5376 (Hs- | | |
| | sense | Mf-Mm) | | |
| | strand | | | |
| MAPT- | 19 mer | 6812-6873- | GUAAUAACUUUAUUUCCAA | 1387 |
| 6812 | anti- | 5377 (Hs- | | |
| | sense | Mf-Mm) | | |
| | strand | | | |
| MAPT- | 19 mer | 6813-6874- | AGUAAUAACUUUAUUUCCA | 1388 |
| 6813 | anti- | 5378 (Hs- | | |
| | sense | Mf-Mm) | | |
| | strand | | | |
| MAPT- | 19 mer | 6814-6875- | GAGUAAUAACUUUAUUUCC | 1389 |
| 6814 | anti- | 5379 (Hs- | | |
| | sense | Mf-Mm) | | |
| | strand | | | |
| MAPT- | 19 mer | 6815-6876- | AGAGUAAUAACUUUAUUUC | 1390 |
| 6815 | anti- | 5380 (Hs- | | |
| | sense | Mf-Mm) | | |
| | strand | | | |
| MAPT- | 19 mer | 6816-6877- | CAGAGUAAUAACUUUAUUU | 1391 |
| 6816 | anti- | 5381 (Hs- | | |
| | sense | Mf-Mm) | | |
| | strand | | | |
| MAPT- | 19 mer | 363 (Hs) | UCCAUCACUUCGAACUCCU | 1392 |
| 363 | anti- | | | |
| | sense | | | |
| | strand | | | |
| MAPT- | 19 mer | 364 (Hs) | UUCCAUCACUUCGAACUCC | 1393 |
| 364 | anti- | | | |
| | sense | | | |
| | strand | | | |
| MAPT- | 19 mer | 365 (Hs) | CUUCCAUCACUUCGAACUC | 1394 |
| 365 | anti- | | | |
| | sense | | | |
| | strand | | | |
| MAPT- | 19 mer | 367 (Hs) | AUCUUCCAUCACUUCGAAC | 1395 |
| 367 | anti- | | | |
| | sense | | | |
| | strand | | | |
| MAPT- | 19 mer | 369 (Hs) | UGAUCUUCCAUCACUUCGA | 1396 |
| 369 | anti- | | | |
| | sense | | | |
| | strand | | | |
| MAPT- | 19 mer | 374-226 | CAGCGUGAUCUUCCAUCAC | 1397 |
| 374 | anti- | (Hs-Mf) | | |
| | sense | | | |
| | strand | | | |
| MAPT- | 19 mer | 395-247 | UGUCCCCCAACCCGUACGU | 1398 |
| 395 | anti- | (Hs-Mf) | | |
| | sense | | | |
| | strand | | | |
| MAPT- | 19 mer | 400-252 | UUUCCUGUCCCCCAACCCG | 1399 |
| 400 | anti- | (Hs-Mf) | | |
| | sense | | | |
| | strand | | | |
| MAPT- | 19 mer | 443-295 | UGUCACCCUCUUGGUCUUG | 1400 |
| 443 | anti- | (Hs-Mf) | | |
| | sense | | | |
| | strand | | | |
| MAPT- | 19 mer | 688-453 | ACCAGCAGCUUCGUCUUCC | 1401 |
| 688 | anti- | (Hs-Mf) | | |
| | sense | | | |
| | strand | | | |
| MAPT- | 19 mer | 689-454 | GACCAGCAGCUUCGUCUUC | 1402 |
| 689 | anti- | (Hs-Mf) | | |
| | sense | | | |
| | strand | | | |
| MAPT- | 19 mer | 690-455 | UGACCAGCAGCUUCGUCUU | 1403 |
| 690 | anti- | (Hs-Mf) | | |
| | sense | | | |
| | strand | | | |
| MAPT- | 19 mer | 693-458 | ACGUGACCAGCAGCUUCGU | 1404 |
| 693 | anti- | (Hs-Mf) | | |
| | sense | | | |
| | strand | | | |
| MAPT- | 19 mer | 695-460 | UCACGUGACCAGCAGCUUC | 1405 |
| 695 | anti- | (Hs-Mf) | | |
| | sense | | | |
| | strand | | | |
| MAPT- | 19 mer | 696-461 | GUCACGUGACCAGCAGCUU | 1406 |
| 696 | anti- | (Hs-Mf) | | |
| | sense | | | |
| | strand | | | |
| MAPT- | 19 mer | 1475-1552 | UGCUUUUACUGACCAUGCG | 1407 |
| 1475 | anti- | (Hs-Mf) | | |
| | sense | | | |
| | strand | | | |
| MAPT- | 19 mer | 1476-1553 | UUGCUUUUACUGACCAUGC | 1408 |
| 1476 | anti- | (Hs-Mf) | | |
| | sense | | | |
| | strand | | | |
| MAPT- | 19 mer | 1479-1556 | UCUUUGCUUUUACUGACCA | 1409 |
| 1479 | anti- | (Hs-Mf) | | |
| | sense | | | |
| | strand | | | |
| MAPT- | 19 mer | 1480-1557 | GUCUUUGCUUUUACUGACC | 1410 |
| 1480 | anti- | (Hs-Mf) | | |
| | sense | | | |
| | strand | | | |
| MAPT- | 19 mer | 1481-1558 | CGUCUUUGCUUUUACUGAC | 1411 |
| 1481 | anti- | (Hs-Mf) | | |
| | sense | | | |
| | strand | | | |
| MAPT- | 19 mer | 1484-1561 | UCCCGUCUUUGCUUUUACU | 1412 |
| 1484 | anti- | (Hs-Mf) | | |
| | sense | | | |
| | strand | | | |
| MAPT- | 19 mer | 1485-1562 | GUCCCGUCUUUGCUUUUAC | 1413 |
| 1485 | anti- | (Hs-Mf) | | |
| | sense | | | |
| | strand | | | |
| MAPT- | 19 mer | 1492-1569 | GCUUCCAGUCCCGUCUUUG | 1414 |
| 1492 | anti- | (Hs-Mf) | | |
| | sense | | | |
| | strand | | | |
| MAPT- | 19 mer | 1494-1571 | UCGCUUCCAGUCCCGUCUU | 1415 |
| 1494 | anti- | (Hs-Mf) | | |
| | sense | | | |
| | strand | | | |
| MAPT- | 19 mer | 1495-1572 | AUCGCUUCCAGUCCCGUCU | 1416 |
| 1495 | anti- | (Hs-Mf) | | |
| | sense | | | |
| | strand | | | |
| MAPT- | 19 mer | 1498-1575 | GUCAUCGCUUCCAGUCCCG | 1417 |
| 1498 | anti- | (Hs-Mf) | | |
| | sense | | | |
| | strand | | | |
| MAPT- | 19 mer | 1499-1576 | UGUCAUCGCUUCCAGUCCC | 1418 |
| 1499 | anti- | (Hs-Mf) | | |
| | sense | | | |
| | strand | | | |
| MAPT- | 19 mer | 1500-1577 | UUGUCAUCGCUUCCAGUCC | 1419 |
| 1500 | anti- | (Hs-Mf) | | |
| | sense | | | |
| | strand | | | |
| MAPT- | 19 mer | 1502-1579 | UUUUGUCAUCGCUUCCAGU | 1420 |
| 1502 | anti- | (Hs-Mf) | | |
| | sense | | | |
| | strand | | | |
| MAPT- | 19 mer | 1503-1580 | UUUUUGUCAUCGCUUCCAG | 1421 |
| 1503 | anti- | (Hs-Mf) | | |
| | sense | | | |
| | strand | | | |
| MAPT- | 19 mer | 1504-1581 | UUUUUUGUCAUCGCUUCCA | 1422 |
| 1504 | anti- | (Hs-Mf) | | |
| | sense | | | |
| | strand | | | |
| MAPT- | 19 mer | 1505-1582 | CUUUUUUGUCAUCGCUUCC | 1423 |
| 1505 | anti- | (Hs-Mf) | | |
| | sense | | | |
| | strand | | | |
| MAPT- | 19 mer | 1506-1583 | GCUUUUUUGUCAUCGCUUC | 1424 |
| 1506 | anti- | (Hs-Mf) | | |
| | sense | | | |
| | strand | | | |
| MAPT- | 19 mer | 1507-1584 | GGCUUUUUUGUCAUCGCUU | 1425 |
| 1507 | anti- | (Hs-Mf) | | |
| | sense | | | |
| | strand | | | |
| MAPT- | 19 mer | 1508-1585 | UGGCUUUUUUGUCAUCGCU | 1426 |
| 1508 | anti- | (Hs-Mf) | | |
| | sense | | | |
| | strand | | | |
| MAPT- | 19 mer | 1509-1586 | UUGGCUUUUUUGUCAUCGC | 1427 |
| 1509 | anti- | (Hs-Mf) | | |
| | sense | | | |
| | strand | | | |
| MAPT- | 19 mer | 1733 (Hs) | CGAUCUUCGUUUUACCAUC | 1428 |
| 1733 | anti- | | | |
| | sense | | | |
| | strand | | | |
| MAPT- | 19 mer | 1796-1873 | CUGGAAUCCUGGUGGCGUU | 1429 |
| 1796 | anti- | (Hs-Mf) | | |
| | sense | | | |
| | strand | | | |
| MAPT- | 19 mer | 1835-1912 | CAGAGCUGGGUGGUGUCUU | 1430 |
| 1835 | anti- | (Hs-Mf) | | |
| | sense | | | |
| | strand | | | |
| MAPT- | 19 mer | 1912-1989 | AUCCCCUGAUUUUGGAGGU | 1431 |
| 1912 | anti- | (Hs-Mf) | | |
| | sense | | | |
| | strand | | | |
| MAPT- | 19 mer | 2094-2171 | UUCAGGUCUGGCAUGGGCA | 1432 |
| 2094 | anti- | (Hs-Mf) | | |
| | sense | | | |
| | strand | | | |
| MAPT- | 19 mer | 2096-2173 | UCUUCAGGUCUGGCAUGGG | 1433 |
| 2096 | anti- | (Hs-Mf) | | |
| | sense | | | |
| | strand | | | |
| MAPT- | 19 mer | 2097-2174 | UUCUUCAGGUCUGGCAUGG | 1434 |
| 2097 | anti- | (Hs-Mf) | | |
| | sense | | | |
| | strand | | | |
| MAPT- | 19 mer | 2098 (Hs) | AUUCUUCAGGUCUGGCAUG | 1435 |
| 2098 | anti- | | | |
| | sense | | | |
| | strand | | | |
| MAPT- | 19 mer | 2105 (Hs) | ACUUGACAUUCUUCAGGUC | 1436 |
| 2105 | anti- | | | |
| | sense | | | |
| | strand | | | |
| MAPT- | 19 mer | 2106 (Hs) | GACUUGACAUUCUUCAGGU | 1437 |
| 2106 | anti- | | | |
| | sense | | | |
| | strand | | | |
| MAPT- | 19 mer | 2107 (Hs) | GGACUUGACAUUCUUCAGG | 1438 |
| 2107 | anti- | | | |
| | sense | | | |
| | strand | | | |
| MAPT- | 19 mer | 2108 (Hs) | UGGACUUGACAUUCUUCAG | 1439 |
| 2108 | anti- | | | |
| | sense | | | |
| | strand | | | |
| MAPT- | 19 mer | 2109 (Hs) | UUGGACUUGACAUUCUUCA | 1440 |
| 2109 | anti- | | | |
| | sense | | | |
| | strand | | | |
| MAPT- | 19 mer | 2117-2194 | AGCCGAUCUUGGACUUGAC | 1441 |
| 2117 | anti- | (Hs-Mf) | | |
| | sense | | | |
| | strand | | | |
| MAPT- | 19 mer | 2136 (Hs) | UGCUUCAGGUUCUCAGUGG | 1442 |
| 2136 | anti- | | | |
| | sense | | | |
| | strand | | | |
| MAPT- | 19 mer | 2137 (Hs) | GUGCUUCAGGUUCUCAGUG | 1443 |
| 2137 | anti- | | | |
| | sense | | | |
| | strand | | | |
| MAPT- | 19 mer | 2269-2346 | UGGUUUGUAGACUAUUUGC | 1444 |
| 2269 | anti- | (Hs-Mf) | | |
| | sense | | | |
| | strand | | | |
| MAPT- | 19 mer | 2270-2347 | CUGGUUUGUAGACUAUUUG | 1445 |
| 2270 | anti- | (Hs-Mf) | | |
| | sense | | | |
| | strand | | | |
| MAPT- | 19 mer | 2271-2348 | ACUGGUUUGUAGACUAUUU | 1446 |
| 2271 | anti- | (Hs-Mf) | | |
| | sense | | | |
| | strand | | | |
| MAPT- | 19 mer | 2272-2349 | AACUGGUUUGUAGACUAUU | 1447 |
| 2272 | anti- | (Hs-Mf) | | |
| | sense | | | |
| | strand | | | |
| MAPT- | 19 mer | 2273-2350 | CAACUGGUUUGUAGACUAU | 1448 |
| 2273 | anti- | (Hs-Mf) | | |
| | sense | | | |
| | strand | | | |
| MAPT- | 19 mer | 2274-2351 | UCAACUGGUUUGUAGACUA | 1449 |
| 2274 | anti- | (Hs-Mf) | | |
| | sense | | | |
| | strand | | | |
| MAPT- | 19 mer | 2275-2352 | GUCAACUGGUUUGUAGACU | 1450 |
| 2275 | anti- | (Hs-Mf) | | |
| | sense | | | |
| | strand | | | |
| MAPT- | 19 mer | 2276-2353 | GGUCAACUGGUUUGUAGAC | 1451 |
| 2276 | anti- | (Hs-Mf) | | |
| | sense | | | |
| | strand | | | |
| MAPT- | 19 mer | 2277-2354 | AGGUCAACUGGUUUGUAGA | 1452 |
| 2277 | anti- | (Hs-Mf) | | |
| | sense | | | |
| | strand | | | |
| MAPT- | 19 mer | 2278-2355 | CAGGUCAACUGGUUUGUAG | 1453 |
| 2278 | anti- | (Hs-Mf) | | |
| | sense | | | |
| | strand | | | |
| MAPT- | 19 mer | 2279-2356 | UCAGGUCAACUGGUUUGUA | 1454 |
| 2279 | anti- | (Hs-Mf) | | |
| | sense | | | |
| | strand | | | |
| MAPT- | 19 mer | 2280-2357 | CUCAGGUCAACUGGUUUGU | 1455 |
| 2280 | anti- | (Hs-Mf) | | |
| | sense | | | |
| | strand | | | |
| MAPT- | 19 mer | 2281-2358 | GCUCAGGUCAACUGGUUUG | 1456 |
| 2281 | anti- | (Hs-Mf) | | |
| | sense | | | |
| | strand | | | |
| MAPT- | 19 mer | 2282-2359 | UGCUCAGGUCAACUGGUUU | 1457 |
| 2282 | anti- | (Hs-Mf) | | |
| | sense | | | |
| | strand | | | |
| MAPT- | 19 mer | 2283-2360 | UUGCUCAGGUCAACUGGUU | 1458 |
| 2283 | anti- | (Hs-Mf) | | |
| | sense | | | |
| | strand | | | |
| MAPT- | 19 mer | 2284-2361 | CUUGCUCAGGUCAACUGGU | 1459 |
| 2284 | anti- | (Hs-Mf) | | |
| | sense | | | |
| | strand | | | |
| MAPT- | 19 mer | 2286-2363 | ACCUUGCUCAGGUCAACUG | 1460 |
| 2286 | anti- | (Hs-Mf) | | |
| | sense | | | |
| | strand | | | |
| MAPT- | 19 mer | 2288-2365 | UCACCUUGCUCAGGUCAAC | 1461 |
| 2288 | anti- | (Hs-Mf) | | |
| | sense | | | |
| | strand | | | |
| MAPT- | 19 mer | 2289-2366 | GUCACCUUGCUCAGGUCAA | 1462 |
| 2289 | anti- | (Hs-Mf) | | |
| | sense | | | |
| | strand | | | |
| MAPT- | 19 mer | 2291-2368 | AGGUCACCUUGCUCAGGUC | 1463 |
| 2291 | anti- | (Hs-Mf) | | |
| | sense | | | |
| | strand | | | |
| MAPT- | 19 mer | 2294-2371 | UGGAGGUCACCUUGCUCAG | 1464 |
| 2294 | anti- | (Hs-Mf) | | |
| | sense | | | |
| | strand | | | |
| MAPT- | 19 mer | 2299-2376 | ACACUUGGAGGUCACCUUG | 1465 |
| 2299 | anti- | (Hs-Mf) | | |
| | sense | | | |
| | strand | | | |
| MAPT- | 19 mer | 2300-2377 | CACACUUGGAGGUCACCUU | 1466 |
| 2300 | anti- | (Hs-Mf) | | |
| | sense | | | |
| | strand | | | |
| MAPT- | 19 mer | 2301-2378 | CCACACUUGGAGGUCACCU | 1467 |
| 2301 | anti- | (Hs-Mf) | | |
| | sense | | | |
| | strand | | | |
| MAPT- | 19 mer | 2308-2385 | UAAUGAGCCACACUUGGAG | 1468 |
| 2308 | anti- | (Hs-Mf) | | |
| | sense | | | |
| | strand | | | |
| MAPT- | 19 mer | 2316-2393 | AUGUUGCCUAAUGAGCCAC | 1469 |
| 2316 | anti- | (Hs-Mf) | | |
| | sense | | | |
| | strand | | | |
| MAPT- | 19 mer | 2317-2394 | GAUGUUGCCUAAUGAGCCA | 1470 |
| 2317 | anti- | (Hs-Mf) | | |
| | sense | | | |
| | strand | | | |
| MAPT- | 19 mer | 2319-2396 | UGGAUGUUGCCUAAUGAGC | 1471 |
| 2319 | anti- | (Hs-Mf) | | |
| | sense | | | |
| | strand | | | |
| MAPT- | 19 mer | 2320-2397 | AUGGAUGUUGCCUAAUGAG | 1472 |
| 2320 | anti- | (Hs-Mf) | | |
| | sense | | | |
| | strand | | | |
| MAPT- | 19 mer | 2322-2399 | UGAUGGAUGUUGCCUAAUG | 1473 |
| 2322 | anti- | (Hs-Mf) | | |
| | sense | | | |
| | strand | | | |
| MAPT- | 19 mer | 2323-2400 | AUGAUGGAUGUUGCCUAAU | 1474 |
| 2323 | anti- | (Hs-Mf) | | |
| | sense | | | |
| | strand | | | |
| MAPT- | 19 mer | 2324-2401 | UAUGAUGGAUGUUGCCUAA | 1475 |
| 2324 | anti- | (Hs-Mf) | | |
| | sense | | | |
| | strand | | | |
| MAPT- | 19 mer | 2326-2403 | UUUAUGAUGGAUGUUGCCU | 1476 |
| 2326 | anti- | (Hs-Mf) | | |
| | sense | | | |
| | strand | | | |
| MAPT- | 19 mer | 2330-2407 | CUGGUUUAUGAUGGAUGUU | 1477 |
| 2330 | anti- | (Hs-Mf) | | |
| | sense | | | |
| | strand | | | |
| MAPT- | 19 mer | 2356-2433 | AGAUUUUACUUCCACCUGG | 1478 |
| 2356 | anti- | (Hs-Mf) | | |
| | sense | | | |
| | strand | | | |
| MAPT- | 19 mer | 2357-2434 | CAGAUUUUACUUCCACCUG | 1479 |
| 2357 | anti- | (Hs-Mf) | | |
| | sense | | | |
| | strand | | | |
| MAPT- | 19 mer | 2358-2435 | UCAGAUUUUACUUCCACCU | 1480 |
| 2358 | anti- | (Hs-Mf) | | |
| | sense | | | |
| | strand | | | |
| MAPT- | 19 mer | 2359-2436 | CUCAGAUUUUACUUCCACC | 1481 |
| 2359 | anti- | (Hs-Mf) | | |
| | sense | | | |
| | strand | | | |
| MAPT- | 19 mer | 2360-2437 | UCUCAGAUUUUACUUCCAC | 1482 |
| 2360 | anti- | (Hs-Mf) | | |
| | sense | | | |
| | strand | | | |
| MAPT- | 19 mer | 2361-2438 | UUCUCAGAUUUUACUUCCA | 1483 |
| 2361 | anti- | (Hs-Mf) | | |
| | sense | | | |
| | strand | | | |
| MAPT- | 19 mer | 2362-2439 | CUUCUCAGAUUUUACUUCC | 1484 |
| 2362 | anti- | (Hs-Mf) | | |
| | sense | | | |
| | strand | | | |
| MAPT- | 19 mer | 2363-2440 | GCUUCUCAGAUUUUACUUC | 1485 |
| 2363 | anti- | (Hs-Mf) | | |
| | sense | | | |
| | strand | | | |
| MAPT- | 19 mer | 2364-2441 | AGCUUCUCAGAUUUUACUU | 1486 |
| 2364 | anti- | (Hs-Mf) | | |
| | sense | | | |
| | strand | | | |
| MAPT- | 19 mer | 2365 (Hs) | AAGCUUCUCAGAUUUUACU | 1487 |
| 2365 | anti- | | | |
| | sense | | | |
| | strand | | | |
| MAPT- | 19 mer | 2372 (Hs) | UGAAGUCAAGCUUCUCAGA | 1488 |
| 2372 | anti- | | | |
| | sense | | | |
| | strand | | | |
| MAPT- | 19 mer | 2373 (Hs) | UUGAAGUCAAGCUUCUCAG | 1489 |
| 2373 | anti- | | | |
| | sense | | | |
| | strand | | | |
| MAPT- | 19 mer | 2374 (Hs) | CUUGAAGUCAAGCUUCUCA | 1490 |
| 2374 | anti- | | | |
| | sense | | | |
| | strand | | | |
| MAPT- | 19 mer | 2375 (Hs) | CCUUGAAGUCAAGCUUCUC | 1491 |
| 2375 | anti- | | | |
| | sense | | | |
| | strand | | | |
| MAPT- | 19 mer | 2376 (Hs) | UCCUUGAAGUCAAGCUUCU | 1492 |
| 2376 | anti- | | | |
| | sense | | | |
| | strand | | | |
| MAPT- | 19 mer | 2377 (Hs) | GUCCUUGAAGUCAAGCUUC | 1493 |
| 2377 | anti- | | | |
| | sense | | | |
| | strand | | | |
| MAPT- | 19 mer | 2378 (Hs) | UGUCCUUGAAGUCAAGCUU | 1494 |
| 2378 | anti- | | | |
| | sense | | | |
| | strand | | | |
| MAPT- | 19 mer | 2379 (Hs) | CUGUCCUUGAAGUCAAGCU | 1495 |
| 2379 | anti- | | | |
| | sense | | | |
| | strand | | | |
| MAPT- | 19 mer | 2380 (Hs) | UCUGUCCUUGAAGUCAAGC | 1496 |
| 2380 | anti- | | | |
| | sense | | | |
| | strand | | | |
| MAPT- | 19 mer | 2381 (Hs) | CUCUGUCCUUGAAGUCAAG | 1497 |
| 2381 | anti- | | | |
| | sense | | | |
| | strand | | | |
| MAPT- | 19 mer | 2382 (Hs) | ACUCUGUCCUUGAAGUCAA | 1498 |
| 2382 | anti- | | | |
| | sense | | | |
| | strand | | | |
| MAPT- | 19 mer | 2390 (Hs) | UCGACUGGACUCUGUCCUU | 1499 |
| 2390 | anti- | | | |
| | sense | | | |
| | strand | | | |
| MAPT- | 19 mer | 2391 (Hs) | UUCGACUGGACUCUGUCCU | 1500 |
| 2391 | anti- | | | |
| | sense | | | |
| | strand | | | |
| MAPT- | 19 mer | 2414-2491 | UGAUAUUGUCCAGGGACCC | 1501 |
| 2414 | anti- | (Hs-Mf) | | |
| | sense | | | |
| | strand | | | |
| MAPT- | 19 mer | 2448-2525 | UCAAUCUUUUUAUUUCCUC | 1502 |
| 2448 | anti- | (Hs-Mf) | | |
| | sense | | | |
| | strand | | | |
| MAPT- | 19 mer | 2449-2526 | UUCAAUCUUUUUAUUUCCU | 1503 |
| 2449 | anti- | (Hs-Mf) | | |
| | sense | | | |
| | strand | | | |
| MAPT- | 19 mer | 2450-2527 | UUUCAAUCUUUUUAUUUCC | 1504 |
| 2450 | anti- | (Hs-Mf) | | |
| | sense | | | |
| | strand | | | |
| MAPT- | 19 mer | 2451-2528 | GUUUCAAUCUUUUUAUUUC | 1505 |
| 2451 | anti- | (Hs-Mf) | | |
| | sense | | | |
| | strand | | | |
| MAPT- | 19 mer | 2452-2529 | GGUUUCAAUCUUUUUAUUU | 1506 |
| 2452 | anti- | (Hs-Mf) | | |
| | sense | | | |
| | strand | | | |
| MAPT- | 19 mer | 2453-2530 | GGGUUUCAAUCUUUUUAUU | 1507 |
| 2453 | anti- | (Hs-Mf) | | |
| | sense | | | |
| | strand | | | |
| MAPT- | 19 mer | 2454-2531 | UGGGUUUCAAUCUUUUUAU | 1508 |
| 2454 | anti- | (Hs-Mf) | | |
| | sense | | | |
| | strand | | | |
| MAPT- | 19 mer | 2456-2533 | UGUGGGUUUCAAUCUUUUU | 1509 |
| 2456 | anti- | (Hs-Mf) | | |
| | sense | | | |
| | strand | | | |
| MAPT- | 19 mer | 2457-2534 | UUGUGGGUUUCAAUCUUUU | 1510 |
| 2457 | anti- | (Hs-Mf) | | |
| | sense | | | |
| | strand | | | |
| MAPT- | 19 mer | | AGACAUUGCUGAGAUGCCG | 1511 |
| 2567 | anti- | 2567 (Hs) | | |
| | sense | | | |
| | strand | | | |
| MAPT- | 19 mer | 2598-2675 | GAGUCUACCAUGUCGAUGC | 1512 |
| 2598 | anti- | (Hs-Mf) | | |
| | sense | | | |
| | strand | | | |
| MAPT- | 19 mer | 2657-2734 | ACAAACCCUGCUUGGCCAG | 1513 |
| 2657 | anti- | (Hs-Mf) | | |
| | sense | | | |
| | strand | | | |
| MAPT- | 19 mer | 2723-2800 | CUUUUUUUUUCCACACUCU | 1514 |
| 2723 | anti- | (Hs-Mf) | | |
| | sense | | | |
| | strand | | | |
| MAPT- | 19 mer | 2724-2801 | UCUUUUUUUUUCCACACUC | 1515 |
| 2724 | anti- | (Hs-Mf) | | |
| | sense | | | |
| | strand | | | |
| MAPT- | 19 mer | 2726-2803 | AUUCUUUUUUUUUCCACAC | 1516 |
| 2726 | anti- | (Hs-Mf) | | |
| | sense | | | |
| | strand | | | |
| MAPT- | 19 mer | 2784-2860- | AACCAAUUAACCGAACUGC | 1517 |
| 2784 | anti- | 1 mismatch | | |
| | sense | (Hs-Mf) | | |
| | strand | | | |
| MAPT- | 19 mer | 2963-3039 | AGAAUCAAAAGGAAUUGCC | 1518 |
| 2963 | anti- | (Hs-Mf) | | |
| | sense | | | |
| | strand | | | |
| MAPT- | 19 mer | 3110-3186 | UUUCAAAUCCUUUGUUGCU | 1519 |
| 3110 | anti- | (Hs-Mf) | | |
| | sense | | | |
| | strand | | | |
| MAPT- | 19 mer | 3114-3190 | CAAGUUUCAAAUCCUUUGU | 1520 |
| 3114 | anti- | (Hs-Mf) | | |
| | sense | | | |
| | strand | | | |
| MAPT- | 19 mer | 3116-3192 | ACCAAGUUUCAAAUCCUUU | 1521 |
| 3116 | anti- | (Hs-Mf) | | |
| | sense | | | |
| | strand | | | |
| MAPT- | 19 mer | 3118-3194 | ACACCAAGUUUCAAAUCCU | 1522 |
| 3118 | anti- | (Hs-Mf) | | |
| | sense | | | |
| | strand | | | |
| MAPT- | 19 mer | 3158-3234 | UCACACAAGGUUGACAUCG | 1523 |
| 3158 | anti- | (Hs-Mf) | | |
| | sense | | | |
| | strand | | | |
| MAPT- | 19 mer | 3503-3576 | GACAUCAAGGUCAGUCUUU | 1524 |
| 3503 | anti- | (Hs-Mf) | | |
| | sense | | | |
| | strand | | | |
| MAPT- | 19 mer | 3589-3661 | AAACAGGGUUUCUGUGGAG | 1525 |
| 3589 | anti- | (Hs-Mf) | | |
| | sense | | | |
| | strand | | | |
| MAPT- | 19 mer | 3591-3663 | UAAAACAGGGUUUCUGUGG | 1526 |
| 3591 | anti- | (Hs-Mf) | | |
| | sense | | | |
| | strand | | | |
| MAPT- | 19 mer | 3592-3664 | AUAAAACAGGGUUUCUGUG | 1527 |
| 3592 | anti- | (Hs-Mf) | | |
| | sense | | | |
| | strand | | | |
| MAPT- | 19 mer | 3593-3665 | AAUAAAACAGGGUUUCUGU | 1528 |
| 3593 | anti- | (Hs-Mf) | | |
| | sense | | | |
| | strand | | | |
| MAPT- | 19 mer | 3594-3666 | CAAUAAAACAGGGUUUCUG | 1529 |
| 3594 | anti- | (Hs-Mf) | | |
| | sense | | | |
| | strand | | | |
| MAPT- | 19 mer | 3595-3667 | UCAAUAAAACAGGGUUUCU | 1530 |
| 3595 | anti- | (Hs-Mf) | | |
| | sense | | | |
| | strand | | | |
| MAPT- | 19 mer | 3596-3668 | CUCAAUAAAACAGGGUUUC | 1531 |
| 3596 | anti- | (Hs-Mf) | | |
| | sense | | | |
| | strand | | | |
| MAPT- | 19 mer | 3597-3669 | ACUCAAUAAAACAGGGUUU | 1532 |
| 3597 | anti- | (Hs-Mf) | | |
| | sense | | | |
| | strand | | | |
| MAPT- | 19 mer | 3598-3670 | AACUCAAUAAAACAGGGUU | 1533 |
| 3598 | anti- | (Hs-Mf) | | |
| | sense | | | |
| | strand | | | |
| MAPT- | 19 mer | 3599-3671 | GAACUCAAUAAAACAGGGU | 1534 |
| 3599 | anti- | (Hs-Mf) | | |
| | sense | | | |
| | strand | | | |
| MAPT- | 19 mer | 3600-3672 | AGAACUCAAUAAAACAGGG | 1535 |
| 3600 | anti- | (Hs-Mf) | | |
| | sense | | | |
| | strand | | | |
| MAPT- | 19 mer | 3601-3673 | CAGAACUCAAUAAAACAGG | 1536 |
| 3601 | anti- | (Hs-Mf) | | |
| | sense | | | |
| | strand | | | |
| MAPT- | 19 mer | 3602-3674 | UCAGAACUCAAUAAAACAG | 1537 |
| 3602 | anti- | (Hs-Mf) | | |
| | sense | | | |
| | strand | | | |
| MAPT- | 19 mer | 3603-3675 | UUCAGAACUCAAUAAAACA | 1538 |
| 3603 | anti- | (Hs-Mf) | | |
| | sense | | | |
| | strand | | | |
| MAPT- | 19 mer | 3605-3677 | CCUUCAGAACUCAAUAAAA | 1539 |
| 3605 | anti- | (Hs-Mf) | | |
| | sense | | | |
| | strand | | | |
| MAPT- | 19 mer | 3607-3679 | AACCUUCAGAACUCAAUAA | 1540 |
| 3607 | anti- | (Hs-Mf) | | |
| | sense | | | |
| | strand | | | |
| MAPT- | 19 mer | 3609-3681 | CCAACCUUCAGAACUCAAU | 1541 |
| 3609 | anti- | (Hs-Mf) | | |
| | sense | | | |
| | strand | | | |
| MAPT- | 19 mer | 3610-3682 | UCCAACCUUCAGAACUCAA | 1542 |
| 3610 | anti- | (Hs-Mf) | | |
| | sense | | | |
| | strand | | | |
| MAPT- | 19 mer | 3677-3749 | CUUACAAAGAGAACUGGUU | 1543 |
| 3677 | anti- | (Hs-Mf) | | |
| | sense | | | |
| | strand | | | |
| MAPT- | 19 mer | 3678-3750 | CCUUACAAAGAGAACUGGU | 1544 |
| 3678 | anti- | (Hs-Mf) | | |
| | sense | | | |
| | strand | | | |
| MAPT- | 19 mer | 3679-3751 | UCCUUACAAAGAGAACUGG | 1545 |
| 3679 | anti- | (Hs-Mf) | | |
| | sense | | | |
| | strand | | | |
| MAPT- | 19 mer | 3680-3752 | GUCCUUACAAAGAGAACUG | 1546 |
| 3680 | anti- | (Hs-Mf) | | |
| | sense | | | |
| | strand | | | |
| MAPT- | 19 mer | 3958-4030 | CACCCUCAGUAUGGAGUAG | 1547 |
| 3958 | anti- | (Hs-Mf) | | |
| | sense | | | |
| | strand | | | |
| MAPT- | 19 mer | 3959-4031 | UCACCCUCAGUAUGGAGUA | 1548 |
| 3959 | anti- | (Hs-Mf) | | |
| | sense | | | |
| | strand | | | |
| MAPT- | 19 mer | 3960-4032 | UUCACCCUCAGUAUGGAGU | 1549 |
| 3960 | anti- | (Hs-Mf) | | |
| | sense | | | |
| | strand | | | |
| MAPT- | 19 mer | 3961-4033 | UUUCACCCUCAGUAUGGAG | 1550 |
| 3961 | anti- | (Hs-Mf) | | |
| | sense | | | |
| | strand | | | |
| MAPT- | 19 mer | 3965-4037 | UUAAUUUCACCCUCAGUAU | 1551 |
| 3965 | anti- | (Hs-Mf) | | |
| | sense | | | |
| | strand | | | |
| MAPT- | 19 mer | 3970-4042 | UUCCCUUAAUUUCACCCUC | 1552 |
| 3970 | anti- | (Hs-Mf) | | |
| | sense | | | |
| | strand | | | |
| MAPT- | 19 mer | 4146-4218 | UCAACAAGGCAGAAACACC | 1553 |
| 4146 | anti- | (Hs-Mf) | | |
| | sense | | | |
| | strand | | | |
| MAPT- | 19 mer | 4474-4545 | AUAUGUUCAGCUGCUCCAG | 1554 |
| 4474 | anti- | (Hs-Mf) | | |
| | sense | | | |
| | strand | | | |
| MAPT- | 19 mer | 4475-4546 | UAUAUGUUCAGCUGCUCCA | 1555 |
| 4475 | anti- | (Hs-Mf) | | |
| | sense | | | |
| | strand | | | |
| MAPT- | 19 mer | 4477-4548 | UGUAUAUGUUCAGCUGCUC | 1556 |
| 4477 | anti- | (Hs-Mf) | | |
| | sense | | | |
| | strand | | | |
| MAPT- | 19 mer | 4478-4549 | AUGUAUAUGUUCAGCUGCU | 1557 |
| 4478 | anti- | (Hs-Mf) | | |
| | sense | | | |
| | strand | | | |
| MAPT- | 19 mer | 4479-4550 | UAUGUAUAUGUUCAGCUGC | 1558 |
| 4479 | anti- | (Hs-Mf) | | |
| | sense | | | |
| | strand | | | |
| MAPT- | 19 mer | 4480-4551 | CUAUGUAUAUGUUCAGCUG | 1559 |
| 4480 | anti- | (Hs-Mf) | | |
| | sense | | | |
| | strand | | | |
| MAPT- | 19 mer | 4481-4552 | UCUAUGUAUAUGUUCAGCU | 1560 |
| 4481 | anti- | (Hs-Mf) | | |
| | sense | | | |
| | strand | | | |
| MAPT- | 19 mer | 4482-4553 | AUCUAUGUAUAUGUUCAGC | 1561 |
| 4482 | anti- | (Hs-Mf) | | |
| | sense | | | |
| | strand | | | |
| MAPT- | 19 mer | 4485-4556 | AACAUCUAUGUAUAUGUUC | 1562 |
| 4485 | anti- | (Hs-Mf) | | |
| | sense | | | |
| | strand | | | |
| MAPT- | 19 mer | 4486-4557 | CAACAUCUAUGUAUAUGUU | 1563 |
| 4486 | anti- | (Hs-Mf) | | |
| | sense | | | |
| | strand | | | |
| MAPT- | 19 mer | 4532 (Hs) | ACAAAUCCAACUACAACUC | 1564 |
| 4532 | anti- | | | |
| | sense | | | |
| | strand | | | |
| MAPT- | 19 mer | 4533 (Hs) | GACAAAUCCAACUACAACU | 1565 |
| 4533 | anti- | | | |
| | sense | | | |
| | strand | | | |
| MAPT- | 19 mer | 4539-4610 | UAAACAGACAAAUCCAACU | 1566 |
| 4539 | anti- | (Hs-Mf) | | |
| | sense | | | |
| | strand | | | |
| MAPT- | 19 mer | 4540-4611 | AUAAACAGACAAAUCCAAC | 1567 |
| 4540 | anti- | (Hs-Mf) | | |
| | sense | | | |
| | strand | | | |
| MAPT- | 19 mer | 4541-4612 | CAUAAACAGACAAAUCCAA | 1568 |
| 4541 | anti- | (Hs-Mf) | | |
| | sense | | | |
| | strand | | | |
| MAPT- | 19 mer | 4543-4614 | AGCAUAAACAGACAAAUCC | 1569 |
| 4543 | anti- | (Hs-Mf) | | |
| | sense | | | |
| | strand | | | |
| MAPT- | 19 mer | 4544-4615 | AAGCAUAAACAGACAAAUC | 1570 |
| 4544 | anti- | (Hs-Mf) | | |
| | sense | | | |
| | strand | | | |
| MAPT- | 19 mer | 4545-4616 | CAAGCAUAAACAGACAAAU | 1571 |
| 4545 | anti- | (Hs-Mf) | | |
| | sense | | | |
| | strand | | | |
| MAPT- | 19 mer | 4546-4617 | CCAAGCAUAAACAGACAAA | 1572 |
| 4546 | anti- | (Hs-Mf) | | |
| | sense | | | |
| | strand | | | |
| MAPT- | 19 mer | 4547-4618 | UCCAAGCAUAAACAGACAA | 1573 |
| 4547 | anti- | (Hs-Mf) | | |
| | sense | | | |
| | strand | | | |
| MAPT- | 19 mer | 4548-4619 | AUCCAAGCAUAAACAGACA | 1574 |
| 4548 | anti- | (Hs-Mf) | | |
| | sense | | | |
| | strand | | | |
| MAPT- | 19 mer | 4549-4620 | AAUCCAAGCAUAAACAGAC | 1575 |
| 4549 | anti- | (Hs-Mf) | | |
| | sense | | | |
| | strand | | | |
| MAPT- | 19 mer | 4550-4621 | GAAUCCAAGCAUAAACAGA | 1576 |
| 4550 | anti- | (Hs-Mf) | | |
| | sense | | | |
| | strand | | | |
| MAPT- | 19 mer | 4551-4622 | UGAAUCCAAGCAUAAACAG | 1577 |
| 4551 | anti- | (Hs-Mf) | | |
| | sense | | | |
| | strand | | | |
| MAPT- | 19 mer | 4552-4623 | GUGAAUCCAAGCAUAAACA | 1578 |
| 4552 | anti- | (Hs-Mf) | | |
| | sense | | | |
| | strand | | | |
| MAPT- | 19 mer | 4554-4625 | UGGUGAAUCCAAGCAUAAA | 1579 |
| 4554 | anti- | (Hs-Mf) | | |
| | sense | | | |
| | strand | | | |
| MAPT- | 19 mer | 4556-4627 | UCUGGUGAAUCCAAGCAUA | 1580 |
| 4556 | anti- | (Hs-Mf) | | |
| | sense | | | |
| | strand | | | |
| MAPT- | 19 mer | 4557-4628 | CUCUGGUGAAUCCAAGCAU | 1581 |
| 4557 | anti- | (Hs-Mf) | | |
| | sense | | | |
| | strand | | | |
| MAPT- | 19 mer | 4558-4629 | ACUCUGGUGAAUCCAAGCA | 1582 |
| 4558 | anti- | (Hs-Mf) | | |
| | sense | | | |
| | strand | | | |
| MAPT- | 19 mer | 4559-4630 | CACUCUGGUGAAUCCAAGC | 1583 |
| 4559 | anti- | (Hs-Mf) | | |
| | sense | | | |
| | strand | | | |
| MAPT- | 19 mer | 4560-4631 | UCACUCUGGUGAAUCCAAG | 1584 |
| 4560 | anti- | (Hs-Mf) | | |
| | sense | | | |
| | strand | | | |
| MAPT- | 19 mer | 4561-4632 | GUCACUCUGGUGAAUCCAA | 1585 |
| 4561 | anti- | (Hs-Mf) | | |
| | sense | | | |
| | strand | | | |
| MAPT- | 19 mer | 4562-4633 | AGUCACUCUGGUGAAUCCA | 1586 |
| 4562 | anti- | (Hs-Mf) | | |
| | sense | | | |
| | strand | | | |
| MAPT- | 19 mer | 4563-4634 | UAGUCACUCUGGUGAAUCC | 1587 |
| 4563 | anti- | (Hs-Mf) | | |
| | sense | | | |
| | strand | | | |
| MAPT- | 19 mer | 4564-4635 | AUAGUCACUCUGGUGAAUC | 1588 |
| 4564 | anti- | (Hs-Mf) | | |
| | sense | | | |
| | strand | | | |
| MAPT- | 19 mer | 4615-4687 | CAUUUCAAGAUACAUGCGU | 1589 |
| 4615 | anti- | (Hs-Mf) | | |
| | sense | | | |
| | strand | | | |
| MAPT- | 19 mer | 4616-4688 | GCAUUUCAAGAUACAUGCG | 1590 |
| 4616 | anti- | (Hs-Mf) | | |
| | sense | | | |
| | strand | | | |
| MAPT- | 19 mer | 4617-4689 | AGCAUUUCAAGAUACAUGC | 1591 |
| 4617 | anti- | (Hs-Mf) | | |
| | sense | | | |
| | strand | | | |
| MAPT- | 19 mer | 4618-4690 | AAGCAUUUCAAGAUACAUG | 1592 |
| 4618 | anti- | (Hs-Mf) | | |
| | sense | | | |
| | strand | | | |
| MAPT- | 19 mer | 4619-4691 | CAAGCAUUUCAAGAUACAU | 1593 |
| 4619 | anti- | (Hs-Mf) | | |
| | sense | | | |
| | strand | | | |
| MAPT- | 19 mer | 4620-4692 | ACAAGCAUUUCAAGAUACA | 1594 |
| 4620 | anti- | (Hs-Mf) | | |
| | sense | | | |
| | strand | | | |
| MAPT- | 19 mer | 4621-4693 | UACAAGCAUUUCAAGAUAC | 1595 |
| 4621 | anti- | (Hs-Mf) | | |
| | sense | | | |
| | strand | | | |
| MAPT- | 19 mer | 4622-4694 | UUACAAGCAUUUCAAGAUA | 1596 |
| 4622 | anti- | (Hs-Mf) | | |
| | sense | | | |
| | strand | | | |
| MAPT- | 19 mer | 4623-4695 | UUUACAAGCAUUUCAAGAU | 1597 |
| 4623 | anti- | (Hs-Mf) | | |
| | sense | | | |
| | strand | | | |
| MAPT- | 19 mer | 4625-4697 | UCUUUACAAGCAUUUCAAG | 1598 |
| 4625 | anti- | (Hs-Mf) | | |
| | sense | | | |
| | strand | | | |
| MAPT- | 19 mer | 4627-4699 | CCUCUUUACAAGCAUUUCA | 1599 |
| 4627 | anti- | (Hs-Mf) | | |
| | sense | | | |
| | strand | | | |
| MAPT- | 19 mer | 4628-4700 | ACCUCUUUACAAGCAUUUC | 1600 |
| 4628 | anti- | (Hs-Mf) | | |
| | sense | | | |
| | strand | | | |
| MAPT- | 19 mer | 4629-4701 | AACCUCUUUACAAGCAUUU | 1601 |
| 4629 | anti- | (Hs-Mf) | | |
| | sense | | | |
| | strand | | | |
| MAPT- | 19 mer | 4630-4702 | AAACCUCUUUACAAGCAUU | 1602 |
| 4630 | anti- | (Hs-Mf) | | |
| | sense | | | |
| | strand | | | |
| MAPT- | 19 mer | 4632-4704 | AGAAACCUCUUUACAAGCA | 1603 |
| 4632 | anti- | (Hs-Mf) | | |
| | sense | | | |
| | strand | | | |
| MAPT- | 19 mer | 4633-4705 | UAGAAACCUCUUUACAAGC | 1604 |
| 4633 | anti- | (Hs-Mf) | | |
| | sense | | | |
| | strand | | | |
| MAPT- | 19 mer | 4825-4897 | GCUUCAGUCCUAAUCCUGU | 1605 |
| 4825 | anti- | (Hs-Mf) | | |
| | sense | | | |
| | strand | | | |
| MAPT- | 19 mer | 4828-4900 | AUCGCUUCAGUCCUAAUCC | 1606 |
| 4828 | anti- | (Hs-Mf) | | |
| | sense | | | |
| | strand | | | |
| MAPT- | 19 mer | 5682-5743 | AGCAGGGCACAAGAACUUC | 1607 |
| 5682 | anti- | (Hs-Mf) | | |
| | sense | | | |
| | strand | | | |
| MAPT- | 19 mer | 5958 (Hs) | UAAAGUGAGUCAGCAGCUU | 1608 |
| 5958 | anti- | | | |
| | sense | | | |
| | strand | | | |
| MAPT- | 19 mer | 5959 (Hs) | AUAAAGUGAGUCAGCAGCU | 1609 |
| 5959 | anti- | | | |
| | sense | | | |
| | strand | | | |
| MAPT- | 19 mer | 5961 (Hs) | UGAUAAAGUGAGUCAGCAG | 1610 |
| 5961 | anti- | | | |
| | sense | | | |
| | strand | | | |
| MAPT- | 19 mer | 5963 (Hs) | AUUGAUAAAGUGAGUCAGC | 1611 |
| 5963 | anti- | | | |
| | sense | | | |
| | strand | | | |
| MAPT- | 19 mer | 5964 (Hs) | UAUUGAUAAAGUGAGUCAG | 1612 |
| 5964 | anti- | | | |
| | sense | | | |
| | strand | | | |
| MAPT- | 19 mer | 5965 (Hs) | CUAUUGAUAAAGUGAGUCA | 1613 |
| 5965 | anti- | | | |
| | sense | | | |
| | strand | | | |
| MAPT- | 19 mer | 5966-6021 | ACUAUUGAUAAAGUGAGUC | 1614 |
| 5966 | anti- | (Hs-Mf) | | |
| | sense | | | |
| | strand | | | |
| MAPT- | 19 mer | 5967-6022 | AACUAUUGAUAAAGUGAGU | 1615 |
| 5967 | anti- | (Hs-Mf) | | |
| | sense | | | |
| | strand | | | |
| MAPT- | 19 mer | 5968-6023 | GAACUAUUGAUAAAGUGAG | 1616 |
| 5968 | anti- | (Hs-Mf) | | |
| | sense | | | |
| | strand | | | |
| MAPT- | 19 mer | 6006-6061 | AACAGGAUACAGUCUCACC | 1617 |
| 6006 | anti- | (Hs-Mf) | | |
| | sense | | | |
| | strand | | | |
| MAPT- | 19 mer | 6007-6062 | AAACAGGAUACAGUCUCAC | 1618 |
| 6007 | anti- | (Hs-Mf) | | |
| | sense | | | |
| | strand | | | |
| MAPT- | 19 mer | 6008-6063 | CAAACAGGAUACAGUCUCA | 1619 |
| 6008 | anti- | (Hs-Mf) | | |
| | sense | | | |
| | strand | | | |
| MAPT- | 19 mer | 6009-6064 | GCAAACAGGAUACAGUCUC | 1620 |
| 6009 | anti- | (Hs-Mf) | | |
| | sense | | | |
| | strand | | | |
| MAPT- | 19 mer | 6010-6065 | AGCAAACAGGAUACAGUCU | 1621 |
| 6010 | anti- | (Hs-Mf) | | |
| | sense | | | |
| | strand | | | |
| MAPT- | 19 mer | 6011-6066 | UAGCAAACAGGAUACAGUC | 1622 |
| 6011 | anti- | (Hs-Mf) | | |
| | sense | | | |
| | strand | | | |
| MAPT- | 19 mer | 6012-6067 | AUAGCAAACAGGAUACAGU | 1623 |
| 6012 | anti- | (Hs-Mf) | | |
| | sense | | | |
| | strand | | | |
| MAPT- | 19 mer | 6013-6068 | AAUAGCAAACAGGAUACAG | 1624 |
| 6013 | anti- | (Hs-Mf) | | |
| | sense | | | |
| | strand | | | |
| MAPT- | 19 mer | 6014-6069 | CAAUAGCAAACAGGAUACA | 1625 |
| 6014 | anti- | (Hs-Mf) | | |
| | sense | | | |
| | strand | | | |
| MAPT- | 19 mer | 6015-6070 | GCAAUAGCAAACAGGAUAC | 1626 |
| 6015 | anti- | (Hs-Mf) | | |
| | sense | | | |
| | strand | | | |
| MAPT- | 19 mer | 6017-6072 | AAGCAAUAGCAAACAGGAU | 1627 |
| 6017 | anti- | (Hs-Mf) | | |
| | sense | | | |
| | strand | | | |
| MAPT- | 19 mer | 6119-6174 | AUGAAAAGGGUUACGAGGC | 1628 |
| 6119 | anti- | (Hs-Mf) | | |
| | sense | | | |
| | strand | | | |
| MAPT- | 19 mer | 6628-6689 | UGCUCAACAUGGCAAACUC | 1629 |
| 6628 | anti- | (Hs-Mf) | | |
| | sense | | | |
| | strand | | | |
| MAPT- | 19 mer | 6629-6690 | CUGCUCAACAUGGCAAACU | 1630 |
| 6629 | anti- | (Hs-Mf) | | |
| | sense | | | |
| | strand | | | |
| MAPT- | 19 mer | 6631-6692 | UCCUGCUCAACAUGGCAAA | 1631 |
| 6631 | anti- | (Hs-Mf) | | |
| | sense | | | |
| | strand | | | |
| MAPT- | 19 mer | 6672-6733 | AUUACCGAAGAAAUCAUGG | 1632 |
| 6672 | anti- | (Hs-Mf) | | |
| | sense | | | |
| | strand | | | |
| MAPT- | 19 mer | 6731 (Hs) | ACAUUCACAGACAGAAAGC | 1633 |
| 6731 | anti- | | | |
| | sense | | | |
| | strand | | | |
| MAPT- | 19 mer | 6732 (Hs) | GACAUUCACAGACAGAAAG | 1634 |
| 6732 | anti- | | | |
| | sense | | | |
| | strand | | | |
| MAPT- | 19 mer | 6738-6799 | UAUAUAGACAUUCACAGAC | 1635 |
| 6738 | anti- | (Hs-Mf) | | |
| | sense | | | |
| | strand | | | |
| MAPT- | 19 mer | 6739-6800 | CUAUAUAGACAUUCACAGA | 1636 |
| 6739 | anti- | (Hs-Mf) | | |
| | sense | | | |
| | strand | | | |
| MAPT- | 19 mer | 6740-6801 | ACUAUAUAGACAUUCACAG | 1637 |
| 6740 | anti- | (Hs-Mf) | | |
| | sense | | | |
| | strand | | | |
| MAPT- | 19 mer | 6741-6802 | CACUAUAUAGACAUUCACA | 1638 |
| 6741 | anti- | (Hs-Mf) | | |
| | sense | | | |
| | strand | | | |
| MAPT- | 19 mer | 6742-6803 | ACACUAUAUAGACAUUCAC | 1639 |
| 6742 | anti- | (Hs-Mf) | | |
| | sense | | | |
| | strand | | | |
| MAPT- | 19 mer | 6743-6804 | UACACUAUAUAGACAUUCA | 1640 |
| 6743 | anti- | (Hs-Mf) | | |
| | sense | | | |
| | strand | | | |
| MAPT- | 19 mer | 6745-6806 | AAUACACUAUAUAGACAUU | 1641 |
| 6745 | anti- | (Hs-Mf) | | |
| | sense | | | |
| | strand | | | |
| MAPT- | 19 mer | 6748-6809 | CACAAUACACUAUAUAGAC | 1642 |
| 6748 | anti- | (Hs-Mf) | | |
| | sense | | | |
| | strand | | | |
| MAPT- | 19 mer | 6749-6810 | ACACAAUACACUAUAUAGA | 1643 |
| 6749 | anti- | (Hs-Mf) | | |
| | sense | | | |
| | strand | | | |
| MAPT- | 19 mer | 6750-6811 | CACACAAUACACUAUAUAG | 1644 |
| 6750 | anti- | (Hs-Mf) | | |
| | sense | | | |
| | strand | | | |
| MAPT- | 19 mer | 6751-6812 | ACACACAAUACACUAUAUA | 1645 |
| 6751 | anti- | (Hs-Mf) | | |
| | sense | | | |
| | strand | | | |
| MAPT- | 19 mer | 6752-6813 | AACACACAAUACACUAUAU | 1646 |
| 6752 | anti- | (Hs-Mf) | | |
| | sense | | | |
| | strand | | | |
| MAPT- | 19 mer | 6753-6814 | AAACACACAAUACACUAUA | 1647 |
| 6753 | anti- | (Hs-Mf) | | |
| | sense | | | |
| | strand | | | |
| MAPT- | 19 mer | 6754-6815 | AAAACACACAAUACACUAU | 1648 |
| 6754 | anti- | (Hs-Mf) | | |
| | sense | | | |
| | strand | | | |
| MAPT- | 19 mer | 6755-6816 | UAAAACACACAAUACACUA | 1649 |
| 6755 | anti- | (Hs-Mf) | | |
| | sense | | | |
| | strand | | | |
| MAPT- | 19 mer | 6756-6817 | UUAAAACACACAAUACACU | 1650 |
| 6756 | anti- | (Hs-Mf) | | |
| | sense | | | |
| | strand | | | |
| MAPT- | 19 mer | 6757-6818 | GUUAAAACACACAAUACAC | 1651 |
| 6757 | anti- | (Hs-Mf) | | |
| | sense | | | |
| | strand | | | |
| MAPT- | 19 mer | 6758-6819 | UGUUAAAACACACAAUACA | 1652 |
| 6758 | anti- | (Hs-Mf) | | |
| | sense | | | |
| | strand | | | |
| MAPT- | 19 mer | 6759-6820 | UUGUUAAAACACACAAUAC | 1653 |
| 6759 | anti- | (Hs-Mf) | | |
| | sense | | | |
| | strand | | | |
| MAPT- | 19 mer | 6760-6821 | UUUGUUAAAACACACAAUA | 1654 |
| 6760 | anti- | (Hs-Mf) | | |
| | sense | | | |
| | strand | | | |
| MAPT- | 19 mer | 6761-6822 | AUUUGUUAAAACACACAAU | 1655 |
| 6761 | anti- | (Hs-Mf) | | |
| | sense | | | |
| | strand | | | |
| MAPT- | 19 mer | 6762-6823 | CAUUUGUUAAAACACACAA | 1656 |
| 6762 | anti- | (Hs-Mf) | | |
| | sense | | | |
| | strand | | | |
| MAPT- | 19 mer | 6763-6824 | UCAUUUGUUAAAACACACA | 1657 |
| 6763 | anti- | (Hs-Mf) | | |
| | sense | | | |
| | strand | | | |
| MAPT- | 19 mer | 6764-6825 | AUCAUUUGUUAAAACACAC | 1658 |
| 6764 | anti- | (Hs-Mf) | | |
| | sense | | | |
| | strand | | | |
| MAPT- | 19 mer | 6765-6826 | AAUCAUUUGUUAAAACACA | 1659 |
| 6765 | anti- | (Hs-Mf) | | |
| | sense | | | |
| | strand | | | |
| MAPT- | 19 mer | 6766-6827 | AAAUCAUUUGUUAAAACAC | 1660 |
| 6766 | anti- | (Hs-Mf) | | |
| | sense | | | |
| | strand | | | |
| MAPT- | 19 mer | 6767-6828 | UAAAUCAUUUGUUAAAACA | 1661 |
| 6767 | anti- | (Hs-Mf) | | |
| | sense | | | |
| | strand | | | |
| MAPT- | 19 mer | 6768-6829 | GUAAAUCAUUUGUUAAAAC | 1662 |
| 6768 | anti- | (Hs-Mf) | | |
| | sense | | | |
| | strand | | | |
| MAPT- | 19 mer | 6769-6830 | UGUAAAUCAUUUGUUAAAA | 1663 |
| 6769 | anti- | (Hs-Mf) | | |
| | sense | | | |
| | strand | | | |
| MAPT- | 19 mer | 6772-6833 | CAGUGUAAAUCAUUUGUUA | 1664 |
| 6772 | anti- | (Hs-Mf) | | |
| | sense | | | |
| | strand | | | |
| MAPT- | 19 mer | 6773-6834 | UCAGUGUAAAUCAUUUGUU | 1665 |
| 6773 | anti- | (Hs-Mf) | | |
| | sense | | | |
| | strand | | | |
| MAPT- | 19 mer | 6774-6835 | GUCAGUGUAAAUCAUUUGU | 1666 |
| 6774 | anti- | (Hs-Mf) | | |
| | sense | | | |
| | strand | | | |
| MAPT- | 19 mer | 6775-6836 | AGUCAGUGUAAAUCAUUUG | 1667 |
| 6775 | anti- | (Hs-Mf) | | |
| | sense | | | |
| | strand | | | |
| MAPT- | 19 mer | 6777-6838 | ACAGUCAGUGUAAAUCAUU | 1668 |
| 6777 | anti- | (Hs-Mf) | | |
| | sense | | | |
| | strand | | | |
| MAPT- | 19 mer | 6778-6839 | AACAGUCAGUGUAAAUCAU | 1669 |
| 6778 | anti- | (Hs-Mf) | | |
| | sense | | | |
| | strand | | | |
| MAPT- | 19 mer | 6779-6840 | CAACAGUCAGUGUAAAUCA | 1670 |
| 6779 | anti- | (Hs-Mf) | | |
| | sense | | | |
| | strand | | | |
| MAPT- | 19 mer | 6780-6841 | GCAACAGUCAGUGUAAAUC | 1671 |
| 6780 | anti- | (Hs-Mf) | | |
| | sense | | | |
| | strand | | | |
| MAPT- | 19 mer | 6781 (Hs) | AGCAACAGUCAGUGUAAAU | 1672 |
| 6781 | anti- | | | |
| | sense | | | |
| | strand | | | |
| MAPT- | 19 mer | 6789 (Hs) | ACUUUUACAGCAACAGUCA | 1673 |
| 6789 | anti- | | | |
| | sense | | | |
| | strand | | | |
| MAPT- | 19 mer | 6792 (Hs) | UUCACUUUUACAGCAACAG | 1674 |
| 6792 | anti- | | | |
| | sense | | | |
| | strand | | | |
| MAPT- | 19 mer | 6793 (Hs) | AUUCACUUUUACAGCAACA | 1675 |
| 6793 | anti- | | | |
| | sense | | | |
| | strand | | | |
| MAPT- | 19 mer | 6795 (Hs) | AAAUUCACUUUUACAGCAA | 1676 |
| 6795 | anti- | | | |
| | sense | | | |
| | strand | | | |
| MAPT- | 19 mer | 6796 (Hs) | CAAAUUCACUUUUACAGCA | 1677 |
| 6796 | anti- | | | |
| | sense | | | |
| | strand | | | |
| MAPT- | 19 mer | 6797 (Hs) | CCAAAUUCACUUUUACAGC | 1678 |
| 6797 | anti- | | | |
| | sense | | | |
| | strand | | | |
| MAPT- | 19 mer | 6798 (Hs) | UCCAAAUUCACUUUUACAG | 1679 |
| 6798 | anti- | | | |
| | sense | | | |
| | strand | | | |
| Stem | N/A | N/A | GCAGCCGAAAGGCUGC | 1680 |
| loop | | | | |
| MAPT- | 20 mer | 2357-2434 | CAGGUGGAAGUAAAAUCUGA | 1681 |
| 2357 | sense | (Hs-Mf) | | |
| | strand | | | |
| MAPT- | 20 mer | 2357-2434 | [ademCs-C16][mA][fG][mG][fU][mG][mG] | 1682 |
| 2357 | sense | (Hs-Mf) | [fA][mA][fG][mU][fA][fA][mA][fA][mU][fC] | |
| | strand | | [mUs][mGs][mA] | |
| Forward | 3′ assay | | GAAGATTGGGTCCCTGGA | 1683 |
| Primer | | | | |
| Reverse | 3′ assay | | TGTCTTGGCTTTGGCGTT | 1684 |
| Primer | | | | |
| Probe | 3′ assay | | 6FAM- CGG AAG GTC /ZEN/ AGC TTG TGG | 1685 |
| | | | GTT TCA | |
| Forward | 5′ assay | | CACCACAGCCACCTTCTC | 1686 |
| Primer | | | | |
| Reverse | 5′ assay | | CTTCCATCACTTCGAACTCCT | 1687 |
| Primer | | | | |
| Probe | 5′ assay | | CGT CCT CGC /ZEN/ CTC TGT CGA CTA | 1688 |

1. An RNAi oligonucleotide for reducing MAPT gene expression, the oligonucleotide comprising a sense strand and an antisense strand, wherein the sense strand is 15 to 50 nucleotides in length, wherein the sense strand and the antisense strand form a duplex region, wherein the antisense strand comprises a region of complementarity to a MAPT mRNA target sequence of any one of SEQ ID NOs: 912-1295, and wherein the region of complementarity is at least 15 contiguous nucleotides in length.

2.-3. (canceled)

4. The RNAi oligonucleotide claim 1, wherein the antisense strand is 15 to 30 nucleotides in length, optionally wherein the antisense strand is 22 nucleotides in length, and wherein antisense strand and the sense strand form a duplex region of at least 19 nucleotides in length, optionally at least 20 nucleotides in length.

5.-8. (canceled)

9. The RNAi oligonucleotide of claim 1, wherein the 3′ end of the sense strand comprises a stem-loop set forth as S1-L-S2, wherein S1 is complementary to S2, and wherein L forms a loop between S1 and S2 of 3-5 nucleotides in length.

10. The RNAi oligonucleotide of claim 9, wherein L is a triloop or a tetraloop, optionally wherein the tetraloop comprises the sequence 5′-GAAA-3′.

11.-12. (canceled)

13. The RNAi oligonucleotide of claim 9, wherein the S1 and S2 are 1-10 nucleotides in length and have the same length, optionally wherein the stem-loop comprises the sequence 5′-GCAGCCGAAAGGCUGC-3′ (SEQ ID NO: 1680).

14.-16. (canceled)

17. The RNAi oligonucleotide of claim 1, wherein the oligonucleotide comprises a blunt end, optionally the blunt end comprises the 3′ end of the sense strand, and optionally wherein the sense strand is 20-22 nucleotides.

18.-20. (canceled)

21. The RNAi oligonucleotide of claim 1, wherein the antisense strand comprises a 3′ overhang sequence of one or more nucleotides in length, optionally wherein the 3′ overhang sequence is 2 nucleotides in length, and optionally wherein the 3′ overhang is selected from AA, GG, AG, and GA.

22.-26. (canceled)

27. The RNAi oligonucleotide of claim 1, wherein the oligonucleotide comprises at least one modified nucleotide.

28. The RNAi oligonucleotide of claim 27, wherein the modified nucleotide comprises a 2′-modification, optionally wherein the 2′-modification is a modification selected from 2′-fluoro and 2′-O-methyl.

29.-35. (canceled)

36. The RNAi oligonucleotide of claim 28, wherein:
(i) the sense strand comprises 36 nucleotides with positions 1-36 from 5′ to 3′, wherein each of positions 3, 5, 8, 10, 12, 13, 15, and 17 comprise a 2′-fluoro modification, the antisense strand comprises 22 nucleotides with positions 1-22 from 5′ to 3′, and wherein each of positions 2, 3, 4, 5, 7, 10 14, 16, and 19 comprise a 2′-fluoro modification, and the remaining nucleotides of the sense strand and the antisense strand comprise a 2′-O-methyl modification; or
(ii) the sense strand comprises 20 nucleotides with positions 1-20 from 5′ to 3′, wherein each of positions 3, 5, 8, 10, 12, 13, 15, and 17 comprise a 2′-fluoro modification, and the remaining nucleotides comprise a 2′-O-methyl modification, the antisense strand comprises 22 nucleotides with positions 1-22 from 5′ to 3′, and wherein each of positions 2, 3, 4, 5, 7, 10 14, 16, and 19 comprise a 2′-fluoro modification, and the remaining nucleotides of the sense strand and the antisense strand comprise a 2′-O-methyl modification.

37.-39. (canceled)

40. The RNAi oligonucleotide of claim 1, wherein the oligonucleotide comprises at least one modified internucleotide linkage, optionally wherein the at least one modified internucleotide linkage is a phosphorothioate linkage.

41. (canceled)

42. The RNAi oligonucleotide of claim 40, wherein the antisense strand comprises a phosphorothioate linkage (i) between positions 1 and 2, and between positions 2 and 3; or (ii) between positions 1 and 2, between positions 2 and 3, and between positions 3 and 4, wherein positions are numbered 1-4 from 5′ to 3′: optionally wherein the antisense strand is 22 nucleotides in length, and wherein the antisense strand comprises a phosphorothioate linkage between positions 20 and 21 and between positions 21 and 22, and wherein positions are numbered 1-22 from 5′ to 3′.

43. (canceled)

44. The RNAi oligonucleotide of claim 40, wherein the sense strand comprises a phosphorothioate linkage between positions 1 and 2, and wherein positions are numbered 1-2 from 5′ to 3′, optionally wherein the sense strand is 20 nucleotides in length, wherein the sense strand comprises a phosphorothioate linkage between positions between positions 1 and 2, between positions 18 and 19 and between positions 19 and 20, and wherein positions are numbered 1-20 from 5′ to 3′.

45. (canceled)

46. The RNAi oligonucleotide of claim 1, wherein the antisense strand comprises a phosphate analog at 4′-carbon of the sugar of the 5′-nucleotide, optionally wherein the phosphate analog is oxymethyl phosphonate, vinyl phosphonate or malonyl phosphonate, further optionally wherein the phosphate analog is a 4′-phosphate analog comprising 4′-oxymethylphosphonate.

47. (canceled)

48. The RNAi oligonucleotide of claim 1, wherein at least one nucleotide of the oligonucleotide is conjugated to one or more targeting ligands.

49.-52. (canceled)

53. The RNAi oligonucleotide of claim 48, wherein each targeting ligand comprises a N-acetylgalactosamine (GalNAc) moiety, optionally wherein the GalNac moiety is a monovalent GalNAc moiety, a bivalent GalNAc moiety, a trivalent GalNAc moiety, or a tetravalent GalNAc moiety.

54.-55. (canceled)

56. The RNAi oligonucleotide of claim 48, wherein the one or more targeting ligands is a lipid moiety, optionally wherein the lipid moiety is conjugated to the 2′ carbon of the ribose ring of the 5′ terminal nucleotide of the sense strand, optionally wherein the lipid moiety is a hydrocarbon chain, and the hydrocarbon chain is a C₈-C₃₀ hydrocarbon chain.

57.-64. (canceled)

65. The RNAi oligonucleotide of claim 1, wherein the sense strand comprises a nucleotide sequence of any one of SEQ ID NOs: 769-803 and 1681; or SEQ ID NOs: 1130, 1095, 1096, 1119, 1120, and 1124.

66. The RNAi oligonucleotide of claim 65, wherein the antisense strand comprises a nucleotide sequence of any one of SEQ ID NOs: 804-838.

67. The RNAi oligonucleotide of claim 1, wherein the sense strand and antisense strands comprise nucleotide sequences selected from the group consisting of:
a) SEQ ID NOs: 769 and 804, respectively;
b) SEQ ID NOs: 770 and 805, respectively;
c) SEQ ID NOs: 771 and 806, respectively;
d) SEQ ID NOs: 772 and 807, respectively;
e) SEQ ID NOs: 773 and 808, respectively;
f) SEQ ID NOs: 774 and 809, respectively;
g) SEQ ID NOs: 775 and 810, respectively;
h) SEQ ID NOs: 776 and 811, respectively;
i) SEQ ID NOs: 777 and 812, respectively;
j) SEQ ID NOs: 778 and 813, respectively;
k) SEQ ID NOs: 779 and 814, respectively;
l) SEQ ID NOs: 780 and 815, respectively;
m) SEQ ID NOs: 781 and 816, respectively;
n) SEQ ID NOs: 782 and 817, respectively;
o) SEQ ID NOs: 783 and 818, respectively;
p) SEQ ID NOs: 784 and 819, respectively;
q) SEQ ID NOs: 785 and 820, respectively;
r) SEQ ID NOs: 786 and 821, respectively;
s) SEQ ID NOs: 787 and 822, respectively;
t) SEQ ID NOs: 788 and 823, respectively;
u) SEQ ID NOs: 789 and 824, respectively;
v) SEQ ID NOs: 790 and 825, respectively;
w) SEQ ID NOs: 791 and 826, respectively;
x) SEQ ID NOs: 792 and 827, respectively;
y) SEQ ID NOs: 793 and 828, respectively;
z) SEQ ID NOs: 794 and 829, respectively;
aa) SEQ ID NOs: 795 and 830, respectively;
bb) SEQ ID NOs: 796 and 831, respectively;
cc) SEQ ID NOs: 797 and 832, respectively;
dd) SEQ ID NOs: 798 and 833, respectively;
ee) SEQ ID NOs: 799 and 834, respectively;
ff) SEQ ID NOs: 800 and 835, respectively;
gg) SEQ ID NOs: 801 and 836, respectively;
hh) SEQ ID NOs: 802 and 837, respectively;
ii) SEQ ID NOs: 803 and 838, respectively; and
jj) SEQ ID NOs: 1681 and 815, respectively.

68.-83. (canceled)

84. The RNAi oligonucleotide of claim 1, wherein the sense strand and antisense strands comprise nucleotide sequences selected from the group consisting of:
a) SEQ ID NOs: 839 and 874, respectively;
b) SEQ ID NOs: 840 and 875, respectively;
c) SEQ ID NOs: 841 and 876, respectively;
d) SEQ ID NOs: 842 and 877, respectively;
e) SEQ ID NOs: 843 and 878, respectively;
f) SEQ ID NOs: 844 and 879, respectively;
g) SEQ ID NOs: 845 and 880, respectively;
h) SEQ ID NOs: 846 and 881, respectively;
i) SEQ ID NOs: 847 and 882, respectively;
j) SEQ ID NOs: 848 and 883, respectively;
k) SEQ ID NOs: 849 and 884, respectively;
l) SEQ ID NOs: 850 and 885, respectively;
m) SEQ ID NOs: 851 and 886, respectively;
n) SEQ ID NOs: 852 and 887, respectively;
o) SEQ ID NOs: 853 and 888, respectively;
p) SEQ ID NOs: 854 and 889, respectively;
q) SEQ ID NOs: 855 and 890, respectively;
r) SEQ ID NOs: 856 and 891, respectively;
s) SEQ ID NOs: 857 and 892, respectively;
t) SEQ ID NOs: 858 and 893, respectively;
u) SEQ ID NOs: 859 and 894, respectively;
v) SEQ ID NOs: 860 and 895, respectively;
w) SEQ ID NOs: 861 and 896, respectively;
x) SEQ ID NOs: 862 and 897, respectively;
y) SEQ ID NOs: 863 and 898, respectively;
z) SEQ ID NOs: 864 and 899, respectively;
aa) SEQ ID NOs: 865 and 900, respectively;
bb) SEQ ID NOs: 866 and 901, respectively;
cc) SEQ ID NOs: 867 and 902, respectively;
dd) SEQ ID NOs: 868 and 903, respectively;
ee) SEQ ID NOs: 869 and 904, respectively;
ff) SEQ ID NOs: 870 and 905, respectively;
gg) SEQ ID NOs: 871 and 906, respectively;
hh) SEQ ID NOs: 872 and 907, respectively;
ii) SEQ ID NOs: 873 and 908, respectively; and
jj) SEQ ID NOs: 1682 and 885, respectively.

85.-93. (canceled)

94. The RNAi oligonucleotide of claim 1, wherein:
(i) the sense strand comprises the sequence and all of the modifications of 5′-[mAs][mG][fA][mG][fJ][mG][mU][fG][mG][fA][mA][fA][fA][mA][fA][mA][fA][mA][mG][mA][mG][mC][mA][mG][mC][mC][mG][ademA-GalNAc][ademA-GalNAc][ademA-GalNAc][mG][mG][mC][mU][mG][mC]-3′ (SEQ ID NO: 841), wherein the antisense strand comprises the sequence and all of the modifications of 5′-[MePhosphonate-4O-mUs][fCs][fU][fU][fU][mU][fU][mU][mU][fU][mU][mC][mC][fA][mC][fA][mC][mU][fC][mUs][mGs][mG]-3′ (SEQ ID NO: 876);
(ii) the sense strand comprises the sequence and all of the modifications of 5′-[mCs][mA][fG][mG][fU][mG][mG][fA][mA][fG][mU][fA][fA][mA][fA][mU][fC][mU][mG][mA][mG][mC][mA][mG][mC][mC][mG][ademA-GalNAc][ademA-GalNAc][ademA-GalNAc][mG][mG][mC][mU][mG][mC]-3′ (SEQ ID NO: 850), wherein the antisense strand comprises the sequence and all of the modifications of 5′-[MePhosphonate-4O-mUs][fCs][fA][fG][fA][mU][fU][mU][mU][fA][mC][mU][mU][fC][mC][fA][mC][mC][fU][mGs][mGs][mG]-3′ (SEQ ID NO: 885);
(iii) wherein the sense strand comprises the sequence and all of the modifications of 5′-[mAs][mG][fG][mU][fG][mG][mA][fA][mG][fU][mA][fA][fA][mA][fU][mC][fU][mG][mA][mA][mG][mC][mA][mG][mC][mC][mG][ademA-GalNAc][ademA-GalNAc][ademA-GalNAc][mG][mG][mC][mU][mG][mC]-3′ (SEQ ID NO: 851), wherein the antisense strand comprises the sequence and all of the modifications of 5′-[MePhosphonate-4O-mUs][fUs][fC][fA][fG][mA][fU][mU][mU][fU][mA][mC][mU][fU][mC][fC][mA][mC][fC][mUs][mGs][mG]-3′ (SEQ ID NO: 886);
(iv) the sense strand comprises the sequence and all of the modifications of 5′-[mAs][mG][fG][mA][fA][mA][mU][fA][mA][fA][mA][fA][fG][mA][fU][mU][fG][mA][mA][mA][mG][mC][mA][mG][mC][mC][mG][ademA-GalNAc][ademA-GalNAc][ademA-GalNAc][mG][mG][mC][mU][mG][mC]-3′ (SEQ ID NO: 868), wherein the antisense strand comprises the sequence and all of the modifications of 5′-[MePhosphonate-4O-mUs][fUs][fU][fC][fA][mA][fU][mC][mU][fU][mU][mU][mU][fA][mU][fU][mU][mC][fC][mUs][mGs][mG]-3′ (SEQ ID NO: 903);
(v) the sense strand comprises the sequence and all of the modifications of 5′-[mGs][mG][fA][mA][fA][mU][mA][fA][mA][fA][mA][fG][fA][mU][fU][mG][fA][mA][mA][mA][mG][mC][mA][mG][mC][mC][mG][ademA-GalNAc][ademA-GalNAc][ademA-GalNAc][mG][mG][mC][mU][mG][mC]-3′ (SEQ ID NO: 869), wherein the antisense strand comprises the sequence and all of the modifications of 5′-[MePhosphonate-4O-mUs][fUs][fU][fU][fC][mA][fA][mU][mC][fU][mU][mU][mU][fU][mA][fU][mU][mU][fC][mCs][mGs][mG]-3′ (SEQ ID NO: 904);
(vi) the sense strand comprises the sequence and all of the modifications of 5′-[mAs][mU][fA][mA][fA][mA][mA][fG][mA][fU][mU][fG][fA][mA][fA][mC][fC][mC[mA][mA][mG][mC][mA][mG][mC][mC][mG][ademA-GalNAc][ademA-GalNAc][ademA-GalNAc][mG][mG][mC]][mU][mG][mC]-3′ (SEQ ID NO: 873), wherein the antisense strand comprises the sequence and all of the modifications of 5′-[MePhosphonate-4O-mUs][fUs][fG][fG][fG][mU][fU][mU][mC][fA][mA][mU][mC][fU][mU][fU][mU][mU][fA][mUs][mGs][mG]-3′ (SEQ ID NO: 908); or
(vii) the sense strand comprises the sequence and all of the modifications of 5′-[ademCs-C16][mA][fG][mG][fU][mG][mG][fA][mA][fG][mU][fA][fA][mA][fA][mU][fC][mUs][mGs][mA]-3′ (SEQ ID NO: 1682), wherein the antisense strand comprises the sequence and all of the modifications of 5′-[MePhosphonate-4O-mUs][fCs][fA][fG][fA][mU][fU][mU][mU][fA][mC][mU][mU][fC][mC][fA][mC][mC][fU][mGs][mGs][mG]-3′ (SEQ ID NO: 885), wherein mC, mA, mG, and mU=2′-OMe ribonucleosides; fA, fC, fG, and fU=2′-F ribonucleosides; s=phosphorothioate; [ademA-GalNAc]= [chemical structure]
and [ademCs-C16]=cytosine with a phosphorothioate linkage conjugated to C₁₆ hydrocarbon chain.

95.-100. (canceled)

101. A pharmaceutical composition comprising the RNAi oligonucleotide of claim 1, and a pharmaceutically acceptable carrier, delivery agent or excipient.

102. A method for treating a subject having a disease, disorder, or condition associated with MAPT gene expression, the method comprising administering to the subject a therapeutically effective amount of the RNAi oligonucleotide of claim 1, thereby treating the subject.

103. (canceled)

104. A method for reducing MAPT gene expression in a cell, a population of cells, or a subject, the method comprising the step of:
i. contacting the cell or the population of cells with the RNAi oligonucleotide of claim 1; or
ii. administering to the subject the RNAi oligonucleotide of claim 1.

The application's sequence listing, which the Patent Office published only in electronic form, follows.

SEQUENCE LISTING (1694 sequences)

SEQ ID NO: 1 - RNA, 25 nt, synthetic construct
  source 1..25: mol_type = other RNA
gagaacctgaagcaccagcagggag

SEQ ID NO: 2 - RNA, 25 nt, synthetic construct
  source 1..25: mol_type = other RNA
agaacctgaagcaccagccaggagg

SEQ ID NO: 3 - RNA, 25 nt, synthetic construct
  source 1..25: mol_type = other RNA
gtgacctccaagtgtggctaattag

SEQ ID NO: 4 - RNA, 25 nt, synthetic construct
  source 1..25: mol_type = other RNA
aggaggtggccaggtggaaataaaa

SEQ ID NO: 5 - DNA, 25 bp, synthetic construct
  source 1..25: mol_type = other DNA
  misc_feature 1..23: note = RNA
  misc_feature 24: note = DNA
  misc_feature 25: note = RNA
gaggtggccaggtggaagtaaaatc

SEQ ID NO: 6 - DNA, 25 bp, synthetic construct
  source 1..25: mol_type = other DNA
  misc_feature 1..24: note = RNA
  misc_feature 25: note = DNA
aggtggccaggtggaagtaaaatct

SEQ ID NO: 7 - DNA, 25 bp, synthetic construct
  source 1..25: mol_type = other DNA
  misc_feature 1..23: note = RNA
  misc_feature 24: note = DNA
  misc_feature 25: note = RNA
ggtggccaggtggaagtaaaatctg

SEQ ID NO: 8 - RNA, 25 nt, synthetic construct
  source 1..25: mol_type = other RNA
gtggccaggtggaagtaaaatctga

SEQ ID NO: 9 - RNA, 25 nt, synthetic construct
  source 1..25: mol_type = other RNA
tggccaggtggaagtaaaaactgag

SEQ ID NO: 10 - RNA, 25 nt, synthetic construct
  source 1..25: mol_type = other RNA
ggccaggtggaagtaaaatatgaga

SEQ ID NO: 11 - RNA, 25 nt, synthetic construct
  source 1..25: mol_type = other RNA
gccaggtggaagtaaaatcagagaa

SEQ ID NO: 12 - DNA, 25 bp, synthetic construct
  source 1..25: mol_type = other DNA
  misc_feature 1..24: note = RNA
  misc_feature 25: note = DNA
aagattgaaacccacaagcagacct

SEQ ID NO: 13 - DNA, 25 bp, synthetic construct
  source 1..25: mol_type = other DNA
  misc_feature 1..23: note = RNA
  misc_feature 24..25: note = DNA
agattgaaacccacaagctaacctt

SEQ ID NO: 14 - DNA, 25 bp, synthetic construct
  source 1..25: mol_type = other DNA
  misc_feature 1..23: note = RNA
  misc_feature 24: note = DNA
  misc_feature 25: note = RNA
gattgaaacccacaagctgaccttc

SEQ ID NO: 15 - RNA, 25 nt, synthetic construct
  source 1..25: mol_type = other RNA
attgaaacccacaagctgaacttcc

SEQ ID NO: 16 - RNA, 25 nt, synthetic construct
  source 1..25: mol_type = other RNA
ttgaaacccacaagctgacattccg

SEQ ID NO: 17 - RNA, 25 nt, synthetic construct
  source 1..25: mol_type = other RNA
tgaaacccacaagctgaccatccgc

SEQ ID NO: 18 - RNA, 25 nt, synthetic construct
  source 1..25: mol_type = other RNA
gaaacccacaagctgacctaccgcg

SEQ ID NO: 19 - RNA, 25 nt, synthetic construct
  source 1..25: mol_type = other RNA
aaacccacaagctgaccttacgcga

SEQ ID NO: 20 - RNA, 25 nt, synthetic construct
  source 1..25: mol_type = other RNA
aacccacaagctgaccttcagcgag

SEQ ID NO: 21 - RNA, 25 nt, synthetic construct
  source 1..25: mol_type = other RNA
gccaaagccaagacagaccacgggg

SEQ ID NO: 22 - RNA, 25 nt, synthetic construct
  source 1..25: mol_type = other RNA
ccaaagccaagacagaccaaggggc

SEQ ID NO: 23 - DNA, 25 bp, synthetic construct
  source 1..25: mol_type = other DNA
  misc_feature 1..23: note = RNA
  misc_feature 24: note = DNA
  misc_feature 25: note = RNA
tctttgtaaggacttgtgcatcttg

SEQ ID NO: 24 - RNA, 25 nt, synthetic construct
  source 1..25: mol_type = other RNA
ctttgtaaggacttgtgccacttgg

SEQ ID NO: 25 - RNA, 25 nt, synthetic construct
  source 1..25: mol_type = other RNA
tttgtaaggacttgtgcctattggg

SEQ ID NO: 26 - RNA, 25 nt, synthetic construct
  source 1..25: mol_type = other RNA
gtaaggacttgtgcctcttaggaga

SEQ ID NO: 27 - RNA, 25 nt, synthetic construct
  source 1..25: mol_type = other RNA
taaggacttgtgcctcttgagagac

SEQ ID NO: 28 - RNA, 25 nt, synthetic construct
  source 1..25: mol_type = other RNA
aaggacttgtgcctcttggaagacg

SEQ ID NO: 29 - DNA, 25 bp, synthetic construct
  source 1..25: mol_type = other DNA
  misc_feature 1..24: note = RNA
  misc_feature 25: note = DNA
gttgtagttggatttgtctatttat

SEQ ID NO: 30 - DNA, 25 bp, synthetic construct
  source 1..25: mol_type = other DNA
  misc_feature 1..23: note = RNA
  misc_feature 24: note = DNA
  misc_feature 25: note = RNA
ttgtagttggatttgtctgattatg

SEQ ID NO: 31 - RNA, 25 nt, synthetic construct
  source 1..25: mol_type = other RNA
tgtagttggatttgtctgtatatgc

SEQ ID NO: 32 - DNA, 25 bp, synthetic construct
  source 1..25: mol_type = other DNA
  misc_feature 1..24: note = RNA
  misc_feature 25: note = DNA
gtagttggatttgtctgttaatgct

SEQ ID NO: 33 - DNA, 25 bp, synthetic construct
  source 1..25: mol_type = other DNA
  misc_feature 1..23: note = RNA
  misc_feature 24..25: note = DNA
tagttggatttgtctgtttatgctt

SEQ ID NO: 34 - RNA, 25 nt, synthetic construct
  source 1..25: mol_type = other RNA
ttcaccagagtgactatgaaagtga

SEQ ID NO: 35 - RNA, 25 nt, synthetic construct
  source 1..25: mol_type = other RNA
tcaccagagtgactatgatagtgaa

SEQ ID NO: 36 - RNA, 25 nt, synthetic construct
  source 1..25: mol_type = other RNA
caccagagtgactatgataatgaaa

SEQ ID NO: 37 - RNA, 25 nt, synthetic construct
  source 1..25: mol_type = other RNA
accagagtgactatgatagagaaaa

SEQ ID NO: 38 - RNA, 25 nt, synthetic construct
  source 1..25: mol_type = other RNA
ccagagtgactatgatagtaaaaag

SEQ ID NO: 39 - RNA, 25 nt, synthetic construct
  source 1..25: mol_type = other RNA
cagagtgactatgatagtgaaaaga

SEQ ID NO: 40 - RNA, 25 nt, synthetic construct
  source 1..25: mol_type = other RNA
agagtgactatgatagtgaaaagaa

SEQ ID NO: 41 - RNA, 25 nt, synthetic construct
  source 1..25: mol_type = other RNA
gagtgactatgatagtgaaaagaaa

SEQ ID NO: 42 - RNA, 25 nt, synthetic construct
  source 1..25: mol_type = other RNA
agtgactatgatagtgaaaagaaaa

SEQ ID NO: 43 - RNA, 25 nt, synthetic construct
  source 1..25: mol_type = other RNA
gtgactatgatagtgaaaaaaaaaa

SEQ ID NO: 44 - RNA, 25 nt, synthetic construct
  source 1..25: mol_type = other RNA
tgactatgatagtgaaaagaaaaaa

SEQ ID NO: 45 - RNA, 25 nt, synthetic construct
  source 1..25: mol_type = other RNA
gactatgatagtgaaaagaaaaaaa

SEQ ID NO: 46 - RNA, 25 nt, synthetic construct
  source 1..25: mol_type = other RNA
actatgatagtgaaaagaaaaaaaa

SEQ ID NO: 47 - RNA, 25 nt, synthetic construct
  source 1..25: mol_type = other RNA
ctatgatagtgaaaagaaaaaaaaa

SEQ ID NO: 48 - RNA, 25 nt, synthetic construct
  source 1..25: mol_type = other RNA
tatgatagtgaaaagaaaaaaaaaa

SEQ ID NO: 49 - RNA, 25 nt, synthetic construct
  source 1..25: mol_type = other RNA
aaaaaaaaggacgcatgtaacttga

SEQ ID NO: 50 - RNA, 25 nt, synthetic construct
  source 1..25: mol_type = other RNA
aaaaaaaggacgcatgtatattgaa

SEQ ID NO: 51 - RNA, 25 nt, synthetic construct
  source 1..25: mol_type = other RNA
aaaaaaggacgcatgtatcatgaaa

SEQ ID NO: 52 - DNA, 25 bp, synthetic construct
  source 1..25: mol_type = other DNA
  misc_feature 1..24: note = RNA
  misc_feature 25: note = DNA
aaaaaggacgcatgtatctagaaat

SEQ ID NO: 53 - DNA, 25 bp, synthetic construct
  source 1..25: mol_type = other DNA
  misc_feature 1..23: note = RNA
  misc_feature 24: note = DNA
  misc_feature 25: note = RNA
aaaaggacgcatgtatcttaaaatg

SEQ ID NO: 54 - RNA, 25 nt, synthetic construct
  source 1..25: mol_type = other RNA
aaaggacgcatgtatcttgaaatgc

SEQ ID NO: 55 - DNA, 25 bp, synthetic construct
  source 1..25: mol_type = other DNA
  misc_feature 1..24: note = RNA
  misc_feature 25: note = DNA
aaggacgcatgtatcttgaaatgct

SEQ ID NO: 56 - DNA, 25 bp, synthetic construct
  source 1..25: mol_type = other DNA
  misc_feature 1..23: note = RNA
  misc_feature 24..25: note = DNA
aggacgcatgtatcttgaaatgctt

SEQ ID NO: 57 - DNA, 25 bp, synthetic construct
  source 1..25: mol_type = other DNA
  misc_feature 1..23: note = RNA
  misc_feature 24: note = DNA
  misc_feature 25: note = RNA
ggacgcatgtatcttgaaaagcttg

SEQ ID NO: 58 - DNA, 25 bp, synthetic construct
  source 1..25: mol_type = other DNA
  misc_feature 1..24: note = RNA
  misc_feature 25: note = DNA
gacgcatgtatcttgaaatacttgt

SEQ ID NO: 59 - RNA, 25 nt, synthetic construct
  source 1..25: mol_type = other RNA
tcactttatcaatagttccatttaa

SEQ ID NO: 60 - RNA, 25 nt, synthetic construct
  source 1..25: mol_type = other RNA
cactttatcaatagttccaattaaa

SEQ ID NO: 61 - DNA, 25 bp, synthetic construct
  source 1..25: mol_type = other DNA
  misc_feature 1..24: note = RNA
  misc_feature 25: note = DNA
actttatcaatagttccatataaat

SEQ ID NO: 62 - DNA, 25 bp, synthetic construct
  source 1..25: mol_type = other DNA
  misc_feature 1..23: note = RNA
  misc_feature 24..25: note = DNA
ctttatcaatagttccattaaaatt

SEQ ID NO: 63 - DNA, 25 bp, synthetic construct
  source 1..25: mol_type = other DNA
  misc_feature 1..23: note = RNA
  misc_feature 24: note = DNA
  misc_feature 25: note = RNA
tttatcaatagttccatttaaattg

SEQ ID NO: 64 - RNA, 25 nt, synthetic construct
  source 1..25: mol_type = other RNA
ttatcaatagttccatttaaattga

SEQ ID NO: 65 - RNA, 25 nt, synthetic construct
  source 1..25: mol_type = other RNA
tatcaatagttccatttaaattgac

SEQ ID NO: 66 - DNA, 25 bp, synthetic construct
  source 1..25: mol_type = other DNA
  misc_feature 1..24: note = RNA
  misc_feature 25: note = DNA
atcaatagttccatttaaaatgact

SEQ ID NO: 67 - DNA, 25 bp, synthetic construct
  source 1..25: mol_type = other DNA
  misc_feature 1..23: note = RNA
  misc_feature 24..25: note = DNA
tcaatagttccatttaaatagactt

SEQ ID NO: 68 - DNA, 25 bp, synthetic construct
  source 1..25: mol_type = other DNA
  misc_feature 1..23: note = RNA
  misc_feature 24: note = DNA
  misc_feature 25: note = RNA
caatagttccatttaaattaacttc

SEQ ID NO: 69 - RNA, 25 nt, synthetic construct
  source 1..25: mol_type = other RNA
aatagttccatttaaattgacttca

SEQ ID NO: 70 - RNA, 25 nt, synthetic construct
  source 1..25: mol_type = other RNA
atagttccatttaaattgaattcag

SEQ ID NO: 71 - DNA, 25 bp, synthetic construct
  source 1..25: mol_type = other DNA
  misc_feature 1..24: note = RNA
  misc_feature 25: note = DNA
tagttccatttaaattgacatcagt

SEQ ID NO: 72 - DNA, 25 bp, synthetic construct
  source 1..25: mol_type = other DNA
  misc_feature 1..23: note = RNA
  misc_feature 24: note = DNA
  misc_feature 25: note = RNA
agttccatttaaattgactacagtg

SEQ ID NO: 73 - RNA, 25 nt, synthetic construct
  source 1..25: mol_type = other RNA
gttccatttaaattgacttaagtgg

SEQ ID NO: 74 - DNA, 25 bp, synthetic construct
  source 1..25: mol_type = other DNA
  misc_feature 1..24: note = RNA
  misc_feature 25: note = DNA
ttccatttaaattgacttcagtggt

SEQ ID NO: 75 - DNA, 25 bp, synthetic construct
  source 1..25: mol_type = other DNA
  misc_feature 1..23: note = RNA
  misc_feature 24: note = DNA
  misc_feature 25: note = RNA
tccatttaaattgacttcaatggtg

SEQ ID NO: 76 - RNA, 25 nt, synthetic construct
  source 1..25: mol_type = other RNA
cttgcaagtcccatgatttattcgg

SEQ ID NO: 77 - DNA, 25 bp, synthetic construct
  source 1..25: mol_type = other DNA
  misc_feature 1..24: note = RNA
  misc_feature 25: note = DNA
ttgcaagtcccatgatttcatcggt

SEQ ID NO: 78 - DNA, 25 bp, synthetic construct
  source 1..25: mol_type = other DNA
  misc_feature 1..23: note = RNA
  misc_feature 24: note = DNA
  misc_feature 25: note = RNA
tgcaagtcccatgatttctacggta

SEQ ID NO: 79 - RNA, 25 nt, synthetic construct
  source 1..25: mol_type = other RNA
gcaagtcccatgatttcttaggtaa

SEQ ID NO: 80 - DNA, 25 bp, synthetic construct
  source 1..25: mol_type = other DNA
  misc_feature 1..24: note = RNA
  misc_feature 25: note = DNA
gtaaaagtgaatttggaaaaaaagt

SEQ ID NO: 81 - DNA, 25 bp, synthetic construct
  source 1..25: mol_type = other DNA
  misc_feature 1..23: note = RNA
  misc_feature 24..25: note = DNA
taaaagtgaatttggaaataaagtt

SEQ ID NO: 82 - DNA, 25 bp, synthetic construct
  source 1..25: mol_type = other DNA
  misc_feature 1..23: note = RNA
  misc_feature 24: note = DNA
  misc_feature 25: note = RNA
aaaagtgaatttggaaataaagtta

SEQ ID NO: 83 - DNA, 25 bp, synthetic construct
  source 1..25: mol_type = other DNA
  misc_feature 1..24: note = RNA
  misc_feature 25: note = DNA
aaagtgaatttggaaataaagttat

SEQ ID NO: 84 - DNA, 25 bp, synthetic construct
  source 1..25: mol_type = other DNA
  misc_feature 1..23: note = RNA
  misc_feature 24..25: note = DNA
aagtgaatttggaaataaaattatt

SEQ ID NO: 85 - DNA, 25 bp, synthetic construct
  source 1..25: mol_type = other DNA
  misc_feature 1..23: note = RNA
  misc_feature 24: note = DNA
  misc_feature 25: note = RNA
agtgaatttggaaataaagatatta

SEQ ID NO: 86 - RNA, 25 nt, synthetic construct
  source 1..25: mol_type = other RNA
gtgaatttggaaataaagtaattac

SEQ ID NO: 87 - DNA, 25 bp, synthetic construct
  source 1..25: mol_type = other DNA
  misc_feature 1..24: note = RNA
  misc_feature 25: note = DNA
tgaatttggaaataaagttattact

SEQ ID NO: 88 - DNA, 25 bp, synthetic construct
  source 1..25: mol_type = other DNA
  misc_feature 1..23: note = RNA
  misc_feature 24: note = DNA
  misc_feature 25: note = RNA
gaatttggaaataaagttaatactc

SEQ ID NO: 89 - DNA, 25 bp, synthetic construct
  source 1..25: mol_type = other DNA
  misc_feature 1..24: note = RNA
  misc_feature 25: note = DNA
aatttggaaataaagttataactct

SEQ ID NO: 90 - DNA, 25 bp, synthetic construct
  source 1..25: mol_type = other DNA
  misc_feature 1..23: note = RNA
  misc_feature 24: note = DNA
  misc_feature 25: note = RNA
atttggaaataaagttattactctg

SEQ ID NO: 91 - RNA, 25 nt, synthetic construct
  source 1..25: mol_type = other RNA
tttggaaataaagttattaatctga

SEQ ID NO: 92 - DNA, 25 bp, synthetic construct
  source 1..25: mol_type = other DNA
  misc_feature 1..24: note = RNA
  misc_feature 25: note = DNA
ttggaaataaagttattacactgat

SEQ ID NO: 93 - DNA, 25 bp, synthetic construct
  source 1..25: mol_type = other DNA
  misc_feature 1..23: note = RNA
  misc_feature 24..25: note = DNA
tggaaataaagttattactatgatt

SEQ ID NO: 94 - DNA, 25 bp, synthetic construct
  source 1..25: mol_type = other DNA
  misc_feature 1..23: note = RNA
  misc_feature 24: note = DNA
  misc_feature 25: note = RNA
ggaaataaagttattactcagatta

SEQ ID NO: 95 - RNA, 25 nt, synthetic construct
  source 1..25: mol_type = other RNA
gaaataaagttattactctaattaa

SEQ ID NO: 96 - RNA, 25 nt, synthetic construct
  source 1..25: mol_type = other RNA
aaataaagttattactctgattaaa

SEQ ID NO: 97 - RNA, 25 nt, synthetic construct
  source 1..25: mol_type = other RNA
aggagttcgaagtgatggaagatca

SEQ ID NO: 98 - RNA, 25 nt, synthetic construct
  source 1..25: mol_type = other RNA
ggagttcgaagtgatggaaaatcac

SEQ ID NO: 99 - RNA, 25 nt, synthetic construct
  source 1..25: mol_type = other RNA
gagttcgaagtgatggaagatcacg

SEQ ID NO: 100 - DNA, 25 bp, synthetic construct
  source 1..25: mol_type = other DNA
  misc_feature 1..24: note = RNA
  misc_feature 25: note = DNA
gttcgaagtgatggaagataacgct

SEQ ID NO: 101 - RNA, 25 nt, synthetic construct
  source 1..25: mol_type = other RNA
tcgaagtgatggaagatcaagctgg

SEQ ID NO: 102 - DNA, 25 bp, synthetic construct
  source 1..25: mol_type = other DNA
  misc_feature 1..24: note = RNA
  misc_feature 25: note = DNA
gtgatggaagatcacgctgagacgt

SEQ ID NO: 103 - RNA, 25 nt, synthetic construct
  source 1..25: mol_type = other RNA
acgtacgggttgggggacaagaaag

SEQ ID NO: 104 - RNA, 25 nt, synthetic construct
  source 1..25: mol_type = other RNA
cgggttgggggacaggaaaaatcag

SEQ ID NO: 105 - RNA, 25 nt, synthetic construct
  source 1..25: mol_type = other RNA
caagaccaagagggtgacaaggacg

SEQ ID NO: 106 - DNA, 25 bp, synthetic construct
  source 1..25: mol_type = other DNA
  misc_feature 1..23: note = RNA
  misc_feature 24: note = DNA
  misc_feature 25: note = RNA
ggaagacgaagctgctggtaacgtg

SEQ ID NO: 107 - RNA, 25 nt, synthetic construct
  source 1..25: mol_type = other RNA
gaagacgaagctgctggtcacgtga

SEQ ID NO: 108 - RNA, 25 nt, synthetic construct
  source 1..25: mol_type = other RNA
aagacgaagctgctggtcaagtgac

SEQ ID NO: 109 - RNA, 25 nt, synthetic construct
  source 1..25: mol_type = other RNA
acgaagctgctggtcacgtaaccca

SEQ ID NO: 110 - RNA, 25 nt, synthetic construct
  source 1..25: mol_type = other RNA
gaagctgctggtcacgtgaaccaag

SEQ ID NO: 111 - RNA, 25 nt, synthetic construct
  source 1..25: mol_type = other RNA
aagctgctggtcacgtgacacaaga

SEQ ID NO: 112 - RNA, 25 nt, synthetic construct
  source 1..25: mol_type = other RNA
cgcatggtcagtaaaagcaaagacg

SEQ ID NO: 113 - RNA, 25 nt, synthetic construct
  source 1..25: mol_type = other RNA
gcatggtcagtaaaagcaaagacgg

SEQ ID NO: 114 - RNA, 25 nt, synthetic construct
  source 1..25: mol_type = other RNA
tggtcagtaaaagcaaagaagggac

SEQ ID NO: 115 - DNA, 25 bp, synthetic construct
  source 1..25: mol_type = other DNA
  misc_feature 1..24: note = RNA
  misc_feature 25: note = DNA
ggtcagtaaaagcaaagacaggact

SEQ ID NO: 116 - DNA, 25 bp, synthetic construct
  source 1..25: mol_type = other DNA
  misc_feature 1..23: note = RNA
  misc_feature 24: note = DNA
  misc_feature 25: note = RNA
gtcagtaaaagcaaagacgagactg

SEQ ID NO: 117 - RNA, 25 nt, synthetic construct
  source 1..25: mol_type = other RNA
agtaaaagcaaagacgggaatggaa

SEQ ID NO: 118 - RNA, 25 nt, synthetic construct
  source 1..25: mol_type = other RNA
gtaaaagcaaagacgggacaggaag

SEQ ID NO: 119 - RNA, 25 nt, synthetic construct
  source 1..25: mol_type = other RNA
caaagacgggactggaagcaatgac

SEQ ID NO: 120 - RNA, 25 nt, synthetic construct
  source 1..25: mol_type = other RNA
aagacgggactggaagcgaagacaa

SEQ ID NO: 121 - RNA, 25 nt, synthetic construct
  source 1..25: mol_type = other RNA
agacgggactggaagcgataacaaa

SEQ ID NO: 122 - RNA, 25 nt, synthetic construct
  source 1..25: mol_type = other RNA
cgggactggaagcgatgacaaaaaa

SEQ ID NO: 123 - RNA, 25 nt, synthetic construct
  source 1..25: mol_type = other RNA
gggactggaagcgatgacaaaaaag

SEQ ID NO: 124 - RNA, 25 nt, synthetic construct
  source 1..25: mol_type = other RNA
ggactggaagcgatgacaaaaaagc

SEQ ID NO: 125 - RNA, 25 nt, synthetic construct
  source 1..25: mol_type = other RNA
actggaagcgatgacaaaaaagcca

SEQ ID NO: 126 - RNA, 25 nt, synthetic construct
  source 1..25: mol_type = other RNA
ctggaagcgatgacaaaaaagccaa

SEQ ID NO: 127 - RNA, 25 nt, synthetic construct
  source 1..25: mol_type = other RNA
tggaagcgatgacaaaaaaaccaag

SEQ ID NO: 128 - RNA, 25 nt, synthetic construct
  source 1..25: mol_type = other RNA
ggaagcgatgacaaaaaagacaaga

SEQ ID NO: 129 - RNA, 25 nt, synthetic construct
  source 1..25: mol_type = other RNA
gaagcgatgacaaaaaagcaaagac

SEQ ID NO: 130 - RNA, 25 nt, synthetic construct
  source 1..25: mol_type = other RNA
aagcgatgacaaaaaagccaagaca

SEQ ID NO: 131 - DNA, 25 bp, synthetic construct
  source 1..25: mol_type = other DNA
  misc_feature 1..24: note = RNA
  misc_feature 25: note = DNA
agcgatgacaaaaaagccaagacat

SEQ ID NO: 132 - DNA, 25 bp, synthetic construct
  source 1..25: mol_type = other DNA
  misc_feature 1..23: note = RNA
  misc_feature 24: note = DNA
  misc_feature 25: note = RNA
gcgatgacaaaaaagccaaaacatc

SEQ ID NO: 133 - RNA, 25 nt, synthetic construct
  source 1..25: mol_type = other RNA
gatggtaaaacgaagatcgacacac

SEQ ID NO: 134 - RNA, 25 nt, synthetic construct
  source 1..25: mol_type = other RNA
aacgccaccaggattccagaaaaaa

SEQ ID NO: 135 - DNA, 25 bp, synthetic construct
  source 1..25: mol_type = other DNA
  misc_feature 1..23: note = RNA
  misc_feature 24: note = DNA
  misc_feature 25: note = RNA
aagacaccacccagctctgagacta

SEQ ID NO: 136 - RNA, 25 nt, synthetic construct
  source 1..25: mol_type = other RNA
acctccaaaatcaggggatagcagc

SEQ ID NO: 137 - DNA, 25 bp, synthetic construct
  source 1..25: mol_type = other DNA
  misc_feature 1..24: note = RNA
  misc_feature 25: note = DNA
tgcccatgccagacctgaaaaatgt

SEQ ID NO: 138 - RNA, 25 nt, synthetic construct
  source 1..25: mol_type = other RNA
cccatgccagacctgaagaatgtca

SEQ ID NO: 139 - RNA, 25 nt, synthetic construct
  source 1..25: mol_type = other RNA
ccatgccagacctgaagaaagtcaa

SEQ ID NO: 140 - RNA, 25 nt, synthetic construct
  source 1..25: mol_type = other RNA
catgccagacctgaagaatatcaag

SEQ ID NO: 141 - RNA, 25 nt, synthetic construct
  source 1..25: mol_type = other RNA
gacctgaagaatgtcaagtacaaga

SEQ ID NO: 142 - DNA, 25 bp, synthetic construct
  source 1..25: mol_type = other DNA
  misc_feature 1..24: note = RNA
  misc_feature 25: note = DNA
acctgaagaatgtcaagtcaaagat

SEQ ID NO: 143 - DNA, 25 bp, synthetic construct
  source 1..25: mol_type = other DNA
  misc_feature 1..23: note = RNA
  misc_feature 24: note = DNA
  misc_feature 25: note = RNA
cctgaagaatgtcaagtccaagatc

SEQ ID NO: 144 - RNA, 25 nt, synthetic construct
  source 1..25: mol_type = other RNA
ctgaagaatgtcaagtccaagatcg

SEQ ID NO: 145 - RNA, 25 nt, synthetic construct
  source 1..25: mol_type = other RNA
tgaagaatgtcaagtccaaaatcgg

SEQ ID NO: 146 - DNA, 25 bp, synthetic construct
  source 1..25: mol_type = other DNA
  misc_feature 1..23: note = RNA
  misc_feature 24: note = DNA
  misc_feature 25: note = RNA
gtcaagtccaagatcggctacactg

SEQ ID NO: 147 - RNA, 25 nt, synthetic construct
  source 1..25: mol_type = other RNA
ccactgagaacctgaagcaacagcc

SEQ ID NO: 148 - RNA, 25 nt, synthetic construct
  source 1..25: mol_type = other RNA
cactgagaacctgaagcacaagccg

SEQ ID NO: 149 - RNA, 25 nt, synthetic construct
  source 1..25: mol_type = other RNA
gcaaatagtctacaaaccaattgac

SEQ ID NO: 150 - RNA, 25 nt, synthetic construct
  source 1..25: mol_type = other RNA
caaatagtctacaaaccagatgacc

SEQ ID NO: 151 - DNA, 25 bp, synthetic construct
  source 1..25: mol_type = other DNA
  misc_feature 1..24: note = RNA
  misc_feature 25: note = DNA
aaatagtctacaaaccagtagacct

SEQ ID NO: 152 - DNA, 25 bp, synthetic construct
  source 1..25: mol_type = other DNA
  misc_feature 1..23: note = RNA
  misc_feature 24: note = DNA
  misc_feature 25: note = RNA
aatagtctacaaaccagttaacctg

SEQ ID NO: 153 - RNA, 25 nt, synthetic construct
  source 1..25: mol_type = other RNA
atagtctacaaaccagttgacctga

SEQ ID NO: 154 - RNA, 25 nt, synthetic construct
  source 1..25: mol_type = other RNA
tagtctacaaaccagttgaactgag

SEQ ID NO: 155 - RNA, 25 nt, synthetic construct
  source 1..25: mol_type = other RNA
agtctacaaaccagttgacatgagc

SEQ ID NO: 156 - RNA, 25 nt, synthetic construct
  source 1..25: mol_type = other RNA
gtctacaaaccagttgaccagagca

SEQ ID NO: 157 - RNA, 25 nt, synthetic construct
  source 1..25: mol_type = other RNA
tctacaaaccagttgacctaagcaa

SEQ ID NO: 158 - RNA, 25 nt, synthetic construct
  source 1..25: mol_type = other RNA
ctacaaaccagttgacctgagcaag

SEQ ID NO: 159 - RNA, 25 nt, synthetic construct
  source 1..25: mol_type = other RNA
tacaaaccagttgacctgaacaagg

SEQ ID NO: 160 - DNA, 25 bp, synthetic construct
  source 1..25: mol_type = other DNA
  misc_feature 1..24: note = RNA
  misc_feature 25: note = DNA
acaaaccagttgacctgagaaaggt

SEQ ID NO: 161 - DNA, 25 bp, synthetic construct
  source 1..25: mol_type = other DNA
  misc_feature 1..23: note = RNA
  misc_feature 24: note = DNA
  misc_feature 25: note = RNA
caaaccagttgacctgagcaaggtg

SEQ ID NO: 162 - RNA, 25 nt, synthetic construct
  source 1..25: mol_type = other RNA
aaaccagttgacctgagcaaggtga

SEQ ID NO: 163 - RNA, 25 nt, synthetic construct
  source 1..25: mol_type = other RNA
aaccagttgacctgagcaaagtgac

SEQ ID NO: 164 - RNA, 25 nt, synthetic construct
  source 1..25: mol_type = other RNA
accagttgacctgagcaagatgacc

SEQ ID NO: 165 - DNA, 25 bp, synthetic construct
  source 1..25: mol_type = other DNA
  misc_feature 1..23: note = RNA
  misc_feature 24: note = DNA
  misc_feature 25: note = RNA
cagttgacctgagcaaggtaacctc

SEQ ID NO: 166 - RNA, 25 nt, synthetic construct
  source 1..25: mol_type = other RNA
gttgacctgagcaaggtgaactcca

SEQ ID NO: 167 - RNA, 25 nt, synthetic construct
  source 1..25: mol_type = other RNA
ttgacctgagcaaggtgacatccaa

SEQ ID NO: 168 - DNA, 25 bp, synthetic construct
  source 1..25: mol_type = other DNA
  misc_feature 1..24: note = RNA
  misc_feature 25: note = DNA
gacctgagcaaggtgacctacaagt

SEQ ID NO: 169 - DNA, 25 bp, synthetic construct
  source 1..25: mol_type = other DNA
  misc_feature 1..23: note = RNA
  misc_feature 24: note = DNA
  misc_feature 25: note = RNA
ctgagcaaggtgacctccaagtgtg

SEQ ID NO: 170 - RNA, 25 nt, synthetic construct
  source 1..25: mol_type = other RNA
caaggtgacctccaagtgtagctca

SEQ ID NO: 171 - DNA, 25 bp, synthetic construct
  source 1..25: mol_type = other DNA
  misc_feature 1..24: note = RNA
  misc_feature 25: note = DNA
aaggtgacctccaagtgtgactcat

SEQ ID NO: 172 - DNA, 25 bp, synthetic construct
  source 1..25: mol_type = other DNA
  misc_feature 1..23: note = RNA
  misc_feature 24..25: note = DNA
aggtgacctccaagtgtggatcatt

SEQ ID NO: 173 - RNA, 25 nt, synthetic construct
  source 1..25: mol_type = other RNA
ctccaagtgtggctcattaagcaac

SEQ ID NO: 174 - RNA, 25 nt, synthetic construct
  source 1..25: mol_type = other RNA
gtggctcattaggcaacatacatca

SEQ ID NO: 175 - DNA, 25 bp, synthetic construct
  source 1..25: mol_type = other DNA
  misc_feature 1..24: note = RNA
  misc_feature 25: note = DNA
tggctcattaggcaacatcaatcat

SEQ ID NO: 176 - RNA, 25 nt, synthetic construct
  source 1..25: mol_type = other RNA
gctcattaggcaacatccaacataa

SEQ ID NO: 177 - RNA, 25 nt, synthetic construct
  source 1..25: mol_type = other RNA
ctcattaggcaacatccataataaa

SEQ ID NO: 178 - RNA, 25 nt, synthetic construct
  source 1..25: mol_type = other RNA
cattaggcaacatccatcaaaaacc

SEQ ID NO: 179 - RNA, 25 nt, synthetic construct
  source 1..25: mol_type = other RNA
attaggcaacatccatcataaacca

SEQ ID NO: 180 - RNA, 25 nt, synthetic construct
  source 1..25: mol_type = other RNA
ttaggcaacatccatcataaaccag

SEQ ID NO: 181 - RNA, 25 nt, synthetic construct
  source 1..25: mol_type = other RNA
aggcaacatccatcataaaacagga

SEQ ID NO: 182 - DNA, 25 bp, synthetic construct
  source 1..25: mol_type = other DNA
  misc_feature 1..23: note = RNA
  misc_feature 24: note = DNA
  misc_feature 25: note = RNA
aacatccatcataaaccagaaggtg

SEQ ID NO: 183 - RNA, 25 nt, synthetic construct
  source 1..25: mol_type = other RNA
ccaggtggaagtaaaatctaagaag

SEQ ID NO: 184 - RNA, 25 nt, synthetic construct
  source 1..25: mol_type = other RNA
caggtggaagtaaaatctgagaagc

SEQ ID NO: 185 - DNA, 25 bp, synthetic construct
  source 1..25: mol_type = other DNA
  misc_feature 1..24: note = RNA
  misc_feature 25: note = DNA
aggtggaagtaaaatctgaaaagct

SEQ ID NO: 186 - DNA, 25 bp, synthetic construct
  source 1..25: mol_type = other DNA
  misc_feature 1..23: note = RNA
  misc_feature 24..25: note = DNA
ggtggaagtaaaatctgagaagctt

SEQ ID NO: 187 - DNA, 25 bp, synthetic construct
  source 1..25: mol_type = other DNA
  misc_feature 1..23: note = RNA
  misc_feature 24: note = DNA
  misc_feature 25: note = RNA
gtggaagtaaaatctgagaagcttg

SEQ ID NO: 188 - RNA, 25 nt, synthetic construct
  source 1..25: mol_type = other RNA
tggaagtaaaatctgagaaacttga

SEQ ID NO: 189 - RNA, 25 nt, synthetic construct
  source 1..25: mol_type = other RNA
ggaagtaaaatctgagaagattgac

SEQ ID NO: 190 - DNA, 25 bp, synthetic construct
  source 1..25: mol_type = other DNA
  misc_feature 1..24: note = RNA
  misc_feature 25: note = DNA
gaagtaaaatctgagaagcatgact

SEQ ID NO: 191 - DNA, 25 bp, synthetic construct
  source 1..25: mol_type = other DNA
  misc_feature 1..23: note = RNA
  misc_feature 24..25: note = DNA
aagtaaaatctgagaagctagactt

SEQ ID NO: 192 - DNA, 25 bp, synthetic construct
  source 1..25: mol_type = other DNA
  misc_feature 1..23: note = RNA
  misc_feature 24: note = DNA
  misc_feature 25: note = RNA
agtaaaatctgagaagcttaacttc

SEQ ID NO: 193 - RNA, 25 nt, synthetic construct
  source 1..25: mol_type = other RNA
tctgagaagcttgacttcaaggaca

SEQ ID NO: 194 - RNA, 25 nt, synthetic construct
  source 1..25: mol_type = other RNA
ctgagaagcttgacttcaaagacag

SEQ ID NO: 195 - RNA, 25 nt, synthetic construct
  source 1..25: mol_type = other RNA
tgagaagcttgacttcaagaacaga

SEQ ID NO: 196 - RNA, 25 nt, synthetic construct
  source 1..25: mol_type = other RNA
gagaagcttgacttcaaggacagag

SEQ ID NO: 197 - DNA, 25 bp, synthetic construct
  source 1..25: mol_type = other DNA
  misc_feature 1..24: note = RNA
  misc_feature 25: note = DNA
agaagcttgacttcaaggaaagagt

SEQ ID NO: 198 - DNA, 25 bp, synthetic construct
  source 1..25: mol_type = other DNA
  misc_feature 1..23: note = RNA
  misc_feature 24: note = DNA
  misc_feature 25: note = RNA
gaagcttgacttcaaggacagagtc

SEQ ID NO: 199 - RNA, 25 nt, synthetic construct
  source 1..25: mol_type = other RNA
aagcttgacttcaaggacaaagtcc

SEQ ID NO: 200 - RNA, 25 nt, synthetic construct
  source 1..25: mol_type = other RNA
agcttgacttcaaggacagagtcca

SEQ ID NO: 201 - RNA, 25 nt, synthetic construct
  source 1..25: mol_type = other RNA
gcttgacttcaaggacagaatccag

SEQ ID NO: 202 - DNA, 25 bp, synthetic construct
  source 1..25: mol_type = other DNA
  misc_feature 1..24: note = RNA
  misc_feature 25: note = DNA
cttgacttcaaggacagagaccagt

SEQ ID NO: 203 - DNA, 25 bp, synthetic construct
  source 1..25: mol_type = other DNA
  misc_feature 1..23: note = RNA
  misc_feature 24: note = DNA
  misc_feature 25: note = RNA
ttgacttcaaggacagagtacagtc

SEQ ID NO: 204 - DNA, 25 bp, synthetic construct
  source 1..25: mol_type = other DNA
  misc_feature 1..23: note = RNA
  misc_feature 24: note = DNA
  misc_feature 25: note = RNA
aaggacagagtccagtcgaagattg

SEQ ID NO: 205 - RNA, 25 nt, synthetic construct
  source 1..25: mol_type = other RNA
aggacagagtccagtcgaaaattgg

SEQ ID NO: 206 - RNA, 25 nt, synthetic construct
  source 1..25: mol_type = other RNA
gggtccctggacaatatcaaccacg

SEQ ID NO: 207 - RNA, 25 nt, synthetic construct
  source 1..25: mol_type = other RNA
gaggaaataaaaagattgaaaccca

SEQ ID NO: 208 - RNA, 25 nt, synthetic construct
  source 1..25: mol_type = other RNA
aggaaataaaaagattgaaacccac

SEQ ID NO: 209 - RNA, 25 nt, synthetic construct
  source 1..25: mol_type = other RNA
ggaaataaaaagattgaaaaccaca

SEQ ID NO: 210 - RNA, 25 nt, synthetic construct
  source 1..25: mol_type = other RNA
gaaataaaaagattgaaacacacaa

SEQ ID NO: 211 - RNA, 25 nt, synthetic construct
  source 1..25: mol_type = other RNA
aaataaaaagattgaaaccaacaag

SEQ ID NO: 212 - RNA, 25 nt, synthetic construct
  source 1..25: mol_type = other RNA
aataaaaagattgaaacccacaagc

SEQ ID NO: 213 - DNA, 25 bp, synthetic construct
  source 1..25: mol_type = other DNA
  misc_feature 1..24: note = RNA
  misc_feature 25: note = DNA
ataaaaagattgaaacccaaaagct

SEQ ID NO: 214 - RNA, 25 nt, synthetic construct
  source 1..25: mol_type = other RNA
aaaaagattgaaacccacaagctga

SEQ ID NO: 215 - RNA, 25 nt, synthetic construct
  source 1..25: mol_type = other RNA
aaaagattgaaacccacaaactgac

SEQ ID NO: 216 - RNA, 25 nt, synthetic construct
  source 1..25: mol_type = other RNA
cggcatctcagcaatgtctactcca

SEQ ID NO: 217 - RNA, 25 nt, synthetic construct
  source 1..25: mol_type = other RNA
gcatcgacatggtagactcacccca

SEQ ID NO: 218 - RNA, 25 nt, synthetic construct
  source 1..25: mol_type = other RNA
ctggccaagcagggtttgtaatcag

SEQ ID NO: 219 - DNA, 25 bp, synthetic construct
  source 1..25: mol_type = other DNA
  misc_feature 1..24: note = RNA
  misc_feature 25: note = DNA
agagtgtggaaaaaaaaagaataat

SEQ ID NO: 220 - DNA, 25 bp, synthetic construct
  source 1..25: mol_type = other DNA
  misc_feature 1..23: note = RNA
  misc_feature 24: note = DNA
  misc_feature 25: note = RNA
gagtgtggaaaaaaaaagaataatg

SEQ ID NO: 221 - RNA, 25 nt, synthetic construct
  source 1..25: mol_type = other RNA
gtgtggaaaaaaaaagaataatgac

SEQ ID NO: 222 - RNA, 25 nt, synthetic construct
  source 1..25: mol_type = other RNA
gcagttcggttaattggttaatcac

SEQ ID NO: 223 - DNA, 25 bp, synthetic construct
  source 1..25: mol_type = other DNA
  misc_feature 1..23: note = RNA
  misc_feature 24: note = DNA
  misc_feature 25: note = RNA
ggcaattccttttgattctattttc

SEQ ID NO: 224 - DNA, 25 bp, synthetic construct
  source 1..25: mol_type = other DNA
  misc_feature 1..24: note = RNA
  misc_feature 25: note = DNA
agcaacaaaggatttgaaaattggt

SEQ ID NO: 225 - DNA, 25 bp, synthetic construct
  source 1..25: mol_type = other DNA
  misc_feature 1..24: note = RNA
  misc_feature 25: note = DNA
acaaaggatttgaaacttgatgtgt

SEQ ID NO: 226 - DNA, 25 bp, synthetic construct
  source 1..25: mol_type = other DNA
  misc_feature 1..23: note = RNA
  misc_feature 24: note = DNA
  misc_feature 25: note = RNA
aaaggatttgaaacttggtatgttc

SEQ ID NO: 227 - DNA, 25 bp, synthetic construct
  source 1..25: mol_type = other DNA
  misc_feature 1..24: note = RNA
  misc_feature 25: note = DNA
aggatttgaaacttggtgtattcgt

SEQ ID NO: 228 - RNA, 25 nt, synthetic construct
  source 1..25: mol_type = other RNA
cgatgtcaaccttgtgtgaatgtga

SEQ ID NO: 229 - RNA, 25 nt, synthetic construct
  source 1..25: mol_type = other RNA
aaagactgaccttgatgtcatgaga

SEQ ID NO: 230 - RNA, 25 nt, synthetic construct
  source 1..25: mol_type = other RNA
ctccacagaaaccctgtttaattga

SEQ ID NO: 231 - DNA, 25 bp, synthetic construct
  source 1..25: mol_type = other DNA
  misc_feature 1..24: note = RNA
  misc_feature 25: note = DNA
ccacagaaaccctgttttaatgagt

SEQ ID NO: 232 - DNA, 25 bp, synthetic construct
  source 1..25: mol_type = other DNA
  misc_feature 1..23: note = RNA
  misc_feature 24..25: note = DNA
cacagaaaccctgttttatagagtt

SEQ ID NO: 233 - DNA, 25 bp, synthetic construct
  source 1..25: mol_type = other DNA
  misc_feature 1..23: note = RNA
  misc_feature 24: note = DNA
  misc_feature 25: note = RNA
acagaaaccctgttttattaagttc

SEQ ID NO: 234 - DNA, 25 bp, synthetic construct
  source 1..25: mol_type = other DNA
  misc_feature 1..24: note = RNA
  misc_feature 25: note = DNA
cagaaaccctgttttattgagttct

SEQ ID NO: 235 - DNA, 25 bp, synthetic construct
  source 1..25: mol_type = other DNA
  misc_feature 1..23: note = RNA
  misc_feature 24: note = DNA
  misc_feature 25: note = RNA
agaaaccctgttttattgaattctg

SEQ ID NO: 236 - RNA, 25 nt, synthetic construct
  source 1..25: mol_type = other RNA
gaaaccctgttttattgagatctga

SEQ ID NO: 237 - RNA, 25 nt, synthetic construct
  source 1..25: mol_type = other RNA
aaaccctgttttattgagtactgaa

SEQ ID NO: 238 - RNA, 25 nt, synthetic construct
  source 1..25: mol_type = other RNA
aaccctgttttattgagttatgaag

SEQ ID NO: 239 - RNA, 25 nt, synthetic construct
  source 1..25: mol_type = other RNA
accctgttttattgagttcagaagg

SEQ ID NO: 240 - DNA, 25 bp, synthetic construct
  source 1..25: mol_type = other DNA
  misc_feature 1..24: note = RNA
  misc_feature 25: note = DNA
ccctgttttattgagttctaaaggt

SEQ ID NO: 241 - DNA, 25 bp, synthetic construct
  source 1..25: mol_type = other DNA
  misc_feature 1..23: note = RNA
  misc_feature 24..25: note = DNA
cctgttttattgagttctgaaggtt

SEQ ID NO: 242 - DNA, 25 bp, synthetic construct
  source 1..25: mol_type = other DNA
  misc_feature 1..23: note = RNA
  misc_feature 24: note = DNA
  misc_feature 25: note = RNA
ctgttttattgagttctgaaggttg

SEQ ID NO: 243 - RNA, 25 nt, synthetic construct
  source 1..25: mol_type = other RNA
tgttttattgagttctgaaagttgg

SEQ ID NO: 244 - RNA, 25 nt, synthetic construct
  source 1..25: mol_type = other RNA
ttttattgagttctgaaggatggaa

SEQ ID NO: 245 - DNA, 25 bp, synthetic construct
  source 1..25: mol_type = other DNA
  misc_feature 1..24: note = RNA
  misc_feature 25: note = DNA
ttattgagttctgaaggttagaact

SEQ ID NO: 246 - RNA, 25 nt, synthetic construct
  source 1..25: mol_type = other RNA
attgagttctgaaggttggaactgc

SEQ ID NO: 247 - DNA, 25 bp, synthetic construct
  source 1..25: mol_type = other DNA
  misc_feature 1..24: note = RNA
  misc_feature 25: note = DNA
ttgagttctgaaggttggaactgct

SEQ ID NO: 248 - DNA, 25 bp, synthetic construct
  source 1..25: mol_type = other DNA
  misc_feature 1..23: note = RNA
  misc_feature 24: note = DNA
  misc_feature 25: note = RNA
aaccagttctctttgtaagaacttg

SEQ ID NO: 249 - DNA, 25 bp, synthetic construct
  source 1..25: mol_type = other DNA
  misc_feature 1..24: note = RNA
  misc_feature 25: note = DNA
accagttctctttgtaaggacttgt

SEQ ID NO: 250 - DNA, 25 bp, synthetic construct
  source 1..25: mol_type = other DNA
  misc_feature 1..23: note = RNA
  misc_feature 24: note = DNA
  misc_feature 25: note = RNA
ccagttctctttgtaaggaattgtg

SEQ ID NO: 251 - RNA, 25 nt, synthetic construct
  source 1..25: mol_type = other RNA
cagttctctttgtaaggacatgtgc

SEQ ID NO: 252 - DNA, 25 bp, synthetic construct
  source 1..25: mol_type = other DNA
  misc_feature 1..23: note = RNA
  misc_feature 24: note = DNA
  misc_feature 25: note = RNA
ctactccatactgagggtgaaatta

SEQ ID NO: 253 - RNA, 25 nt, synthetic construct
  source 1..25: mol_type = other RNA
tactccatactgagggtgaaattaa

SEQ ID NO: 254 - RNA, 25 nt, synthetic construct
  source 1..25: mol_type = other RNA
actccatactgagggtgaaattaag

SEQ ID NO: 255 - RNA, 25 nt, synthetic construct
  source 1..25: mol_type = other RNA
ctccatactgagggtgaaaataagg

SEQ ID NO: 256 - RNA, 25 nt, synthetic construct
  source 1..25: mol_type = other RNA
atactgagggtgaaattaaaggaag

SEQ ID NO: 257 - RNA, 25 nt, synthetic construct
  source 1..25: mol_type = other RNA
gagggtgaaattaagggaaagcaaa

SEQ ID NO: 258 - RNA, 25 nt, synthetic construct
  source 1..25: mol_type = other RNA
ggtgtttctgccttgttgaaatgga

SEQ ID NO: 259 - RNA, 25 nt, synthetic construct
  source 1..25: mol_type = other RNA
ctggagcagctgaacatatacatag

SEQ ID NO: 260 - RNA, 25 nt, synthetic construct
  source 1..25: mol_type = other RNA
tggagcagctgaacatataaataga

SEQ ID NO: 261 - DNA, 25 bp, synthetic construct
  source 1..25: mol_type = other DNA
  misc_feature 1..23: note = RNA
  misc_feature 24: note = DNA
  misc_feature 25: note = RNA
gagcagctgaacatatacaaagatg

SEQ ID NO: 262 - DNA, 25 bp, synthetic construct
  source 1..25: mol_type = other DNA
  misc_feature 1..24: note = RNA
  misc_feature 25: note = DNA
agcagctgaacatatacatagatgt

SEQ ID NO: 263 - DNA, 25 bp, synthetic construct
  source 1..25: mol_type = other DNA
  misc_feature 1..23: note = RNA
  misc_feature 24..25: note = DNA
gcagctgaacatatacataaatgtt

SEQ ID NO: 264 - DNA, 25 bp, synthetic construct
  source 1..25: mol_type = other DNA
  misc_feature 1..23: note = RNA
  misc_feature 24: note = DNA
  misc_feature 25: note = RNA
cagctgaacatatacatagatgttg

SEQ ID NO: 265 - RNA, 25 nt, synthetic construct
  source 1..25: mol_type = other RNA
agctgaacatatacatagaagttgc

SEQ ID NO: 266 - RNA, 25 nt, synthetic construct
  source 1..25: mol_type = other RNA
gctgaacatatacatagatattgcc

SEQ ID NO: 267 - DNA, 25 bp, synthetic construct
  source 1..25: mol_type = other DNA
  misc_feature 1..23: note = RNA
  misc_feature 24: note = DNA
  misc_feature 25: note = RNA
gaacatatacatagatgttaccctg

SEQ ID NO: 268 - RNA, 25 nt, synthetic construct
  source 1..25: mol_type = other RNA
aacatatacatagatgttgacctgc

SEQ ID NO: 269 - DNA, 25 bp, synthetic construct
  source 1..25: mol_type = other DNA
  misc_feature 1..23: note = RNA
  misc_feature 24..25: note = DNA
gagttgtagttggatttgtatgttt

SEQ ID NO: 270 - DNA, 25 bp, synthetic construct
  source 1..25: mol_type = other DNA
  misc_feature 1..23: note = RNA
  misc_feature 24: note = DNA
  misc_feature 25: note = RNA
agttgtagttggatttgtcagttta

SEQ ID NO: 271 - DNA, 25 bp, synthetic construct
  source 1..25: mol_type = other DNA
  misc_feature 1..23: note = RNA
  misc_feature 24: note = DNA
  misc_feature 25: note = RNA
agttggatttgtctgtttaagcttg

SEQ ID NO: 272 - RNA, 25 nt, synthetic construct
  source 1..25: mol_type = other RNA
gttggatttgtctgtttatacttgg

SEQ ID NO: 273 - RNA, 25 nt, synthetic construct
  source 1..25: mol_type = other RNA
ttggatttgtctgtttatgattgga

SEQ ID NO: 274 - DNA, 25 bp, synthetic construct
  source 1..25: mol_type = other DNA
  misc_feature 1..23: note = RNA
  misc_feature 24..25: note = DNA
ggatttgtctgtttatgctaggatt

SEQ ID NO: 275 - DNA, 25 bp, synthetic construct
  source 1..25: mol_type = other DNA
  misc_feature 1..23: note = RNA
  misc_feature 24: note = DNA
  misc_feature 25: note = RNA
gatttgtctgtttatgcttagattc

SEQ ID NO: 276 - RNA, 25 nt, synthetic construct
  source 1..25: mol_type = other RNA
atttgtctgtttatgcttgaattca

SEQ ID NO: 277 - RNA, 25 nt, synthetic construct
  source 1..25: mol_type = other RNA
tttgtctgtttatgcttggattcac

SEQ ID NO: 278 - RNA, 25 nt, synthetic construct
  source 1..25: mol_type = other RNA
ttgtctgtttatgcttggaatcacc

SEQ ID NO: 279 - RNA, 25 nt, synthetic construct
  source 1..25: mol_type = other RNA
tgtctgtttatgcttggatacacca

SEQ ID NO: 280 - RNA, 25 nt, synthetic construct
  source 1..25: mol_type = other RNA
gtctgtttatgcttggattaaccag

SEQ ID NO: 281 - RNA, 25 nt, synthetic construct
  source 1..25: mol_type = other RNA
tctgtttatgcttggattcaccaga

SEQ ID NO: 282 - RNA, 25 nt, synthetic construct
  source 1..25: mol_type = other RNA
ctgtttatgcttggattcaacagag

SEQ ID NO: 283 - DNA, 25 bp, synthetic construct
  source 1..25: mol_type = other DNA
  misc_feature 1..24: note = RNA
  misc_feature 25: note = DNA
tgtttatgcttggattcacaagagt

SEQ ID NO: 284 - RNA, 25 nt, synthetic construct
  source 1..25: mol_type = other RNA
tttatgcttggattcaccaaagtga

SEQ ID NO: 285 - DNA, 25 bp, synthetic construct
  source 1..25: mol_type = other DNA
  misc_feature 1..24: note = RNA
  misc_feature 25: note = DNA
tatgcttggattcaccagaatgact

SEQ ID NO: 286 - DNA, 25 bp, synthetic construct
  source 1..25: mol_type = other DNA
  misc_feature 1..23: note = RNA
  misc_feature 24: note = DNA
  misc_feature 25: note = RNA
atgcttggattcaccagagagacta

SEQ ID NO: 287 - DNA, 25 bp, synthetic construct
  source 1..25: mol_type = other DNA
  misc_feature 1..24: note = RNA
  misc_feature 25: note = DNA
tgcttggattcaccagagtaactat

SEQ ID NO: 288 - DNA, 25 bp, synthetic construct
  source 1..25: mol_type = other DNA
  misc_feature 1..23: note = RNA
  misc_feature 24: note = DNA
  misc_feature 25: note = RNA
gcttggattcaccagagtgactatg

SEQ ID NO: 289 - RNA, 25 nt, synthetic construct
  source 1..25: mol_type = other RNA
cttggattcaccagagtgaatatga

SEQ ID NO: 290 - DNA, 25 bp, synthetic construct
  source 1..25: mol_type = other DNA
  misc_feature 1..24: note = RNA
  misc_feature 25: note = DNA
ttggattcaccagagtgacaatgat

SEQ ID NO: 291 - DNA, 25 bp, synthetic construct
  source 1..25: mol_type = other DNA
  misc_feature 1..23: note = RNA
  misc_feature 24: note = DNA
  misc_feature 25: note = RNA
tggattcaccagagtgactatgata

SEQ ID NO: 292 - RNA, 25 nt, synthetic construct
  source 1..25: mol_type = other RNA
ggattcaccagagtgactaagatag

SEQ ID NO: 293 - DNA, 25 bp, synthetic construct
  source 1..25: mol_type = other DNA
  misc_feature 1..24: note = RNA
  misc_feature 25: note = DNA
gattcaccagagtgactataatagt

SEQ ID NO: 294 - DNA, 25 bp, synthetic construct
  source 1..25: mol_type = other DNA
  misc_feature 1..23: note = RNA
  misc_feature 24: note = DNA
  misc_feature 25: note = RNA
acgcatgtatcttgaaatgattgta

SEQ ID NO: 295 - RNA, 25 nt, synthetic construct
  source 1..25: mol_type = other RNA
cgcatgtatcttgaaatgcatgtaa

SEQ ID NO: 296 - RNA, 25 nt, synthetic construct
  source 1..25: mol_type = other RNA
gcatgtatcttgaaatgctagtaaa

SEQ ID NO: 297 - RNA, 25 nt, synthetic construct
  source 1..25: mol_type = other RNA
catgtatcttgaaatgcttataaag

SEQ ID NO: 298 - RNA, 25 nt, synthetic construct
  source 1..25: mol_type = other RNA
atgtatcttgaaatgcttgaaaaga

SEQ ID NO: 299 - RNA, 25 nt, synthetic construct
  source 1..25: mol_type = other RNA
tgtatcttgaaatgcttgtaaagag

SEQ ID NO: 300 - RNA, 25 nt, synthetic construct
  source 1..25: mol_type = other RNA
gtatcttgaaatgcttgtaaagagg

SEQ ID NO: 301 - DNA, 25 bp, synthetic construct
  source 1..25: mol_type = other DNA
  misc_feature 1..24: note = RNA
  misc_feature 25: note = DNA
tatcttgaaatgcttgtaaagaggt

SEQ ID NO: 302 - DNA, 25 bp, synthetic construct
  source 1..25: mol_type = other DNA
  misc_feature 1..23: note = RNA
  misc_feature 24..25: note = DNA
atcttgaaatgcttgtaaaaaggtt

SEQ ID NO: 303 - DNA, 25 bp, synthetic construct
  source 1..25: mol_type = other DNA
  misc_feature 1..23: note = RNA
  misc_feature 24: note = DNA
  misc_feature 25: note = RNA
cttgaaatgcttgtaaagaagtttc

SEQ ID NO: 304 - DNA, 25 bp, synthetic construct
  source 1..25: mol_type = other DNA
  misc_feature 1..23: note = RNA
  misc_feature 24: note = DNA
  misc_feature 25: note = RNA
tgaaatgcttgtaaagaggattcta

SEQ ID NO: 305 - RNA, 25 nt, synthetic construct
  source 1..25: mol_type = other RNA
gaaatgcttgtaaagaggtatctaa

SEQ ID NO: 306 - RNA, 25 nt, synthetic construct
  source 1..25: mol_type = other RNA
aaatgcttgtaaagaggttactaac

SEQ ID NO: 307 - RNA, 25 nt, synthetic construct
  source 1..25: mol_type = other RNA
aatgcttgtaaagaggtttataacc

SEQ ID NO: 308 - RNA, 25 nt, synthetic construct
  source 1..25: mol_type = other RNA
tgcttgtaaagaggtttctaaccca

SEQ ID NO: 309 - RNA, 25 nt, synthetic construct
  source 1..25: mol_type = other RNA
gcttgtaaagaggtttctaacccac

SEQ ID NO: 310 - DNA, 25 bp, synthetic construct
  source 1..25: mol_type = other DNA
  misc_feature 1..24: note = RNA
  misc_feature 25: note = DNA
acaggattaggactgaagcaatgat

SEQ ID NO: 311 - DNA, 25 bp, synthetic construct
  source 1..25: mol_type = other DNA
  misc_feature 1..23: note = RNA
  misc_feature 24: note = DNA
  misc_feature 25: note = RNA
ggattaggactgaagcgataatgtc

SEQ ID NO: 312 - RNA, 25 nt, synthetic construct
  source 1..25: mol_type = other RNA
gaagttcttgtgccctgctattcag

SEQ ID NO: 313 - DNA, 25 bp, synthetic construct
  source 1..25: mol_type = other DNA
  misc_feature 1..23: note = RNA
  misc_feature 24: note = DNA
  misc_feature 25: note = RNA
aagctgctgactcactttaacaata

SEQ ID NO: 314 - RNA, 25 nt, synthetic construct
  source 1..25: mol_type = other RNA
agctgctgactcactttataaatag

SEQ ID NO: 315 - DNA, 25 bp, synthetic construct
  source 1..25: mol_type = other DNA
  misc_feature 1..23: note = RNA
  misc_feature 24..25: note = DNA
ctgctgactcactttatcaatagtt

SEQ ID NO: 316 - RNA, 25 nt, synthetic construct
  source 1..25: mol_type = other RNA
gctgactcactttatcaatagttcc

SEQ ID NO: 317 - RNA, 25 nt, synthetic construct
  source 1..25: mol_type = other RNA
ctgactcactttatcaataattcca

SEQ ID NO: 318 - RNA, 25 nt, synthetic construct
  source 1..25: mol_type = other RNA
tgactcactttatcaatagttccat

SEQ ID NO: 319 - DNA, 25 bp, synthetic construct
  source 1..25: mol_type = other DNA
  misc_feature 1..23: note = RNA
  misc_feature 24..25: note = DNA
gactcactttatcaatagtaccatt

SEQ ID NO: 320 - DNA, 25 bp, synthetic construct
  source 1..25: mol_type = other DNA
  misc_feature 1..23: note = RNA
  misc_feature 24..25: note = DNA
actcactttatcaatagttacattt

SEQ ID NO: 321 - DNA, 25 bp, synthetic construct
  source 1..25: mol_type = other DNA
  misc_feature 1..23: note = RNA
  misc_feature 24: note = DNA
  misc_feature 25: note = RNA
ctcactttatcaatagttcaattta

SEQ ID NO: 322 - DNA, 25 bp, synthetic construct
  source 1..25: mol_type = other DNA
  misc_feature 1..24: note = RNA
  misc_feature 25: note = DNA
ggtgagactgtatcctgttagctat

SEQ ID NO: 323 - DNA, 25 bp, synthetic construct
  source 1..25: mol_type = other DNA
  misc_feature 1..23: note = RNA
  misc_feature 24..25: note = DNA
gtgagactgtatcctgtttactatt

SEQ ID NO: 324 - DNA, 25 bp, synthetic construct
  source 1..25: mol_type = other DNA
  misc_feature 1..23: note = RNA
  misc_feature 24: note = DNA
  misc_feature 25: note = RNA
tgagactgtatcctgtttgatattg

SEQ ID NO: 325 - RNA, 25 nt, synthetic construct
  source 1..25: mol_type = other RNA
gagactgtatcctgtttgcaattgc

SEQ ID NO: 326 - DNA, 25 bp, synthetic construct
  source 1..25: mol_type = other DNA
  misc_feature 1..24: note = RNA
  misc_feature 25: note = DNA
agactgtatcctgtttgctattgct

SEQ ID NO: 327 - DNA, 25 bp, synthetic construct
  source 1..25: mol_type = other DNA
  misc_feature 1..23: note = RNA
  misc_feature 24..25: note = DNA
gactgtatcctgtttgctaatgctt

SEQ ID NO: 328 - DNA, 25 bp, synthetic construct
  source 1..25: mol_type = other DNA
  misc_feature 1..23: note = RNA
  misc_feature 24: note = DNA
  misc_feature 25: note = RNA
actgtatcctgtttgctatagcttg

SEQ ID NO: 329 - DNA, 25 bp, synthetic construct
  source 1..25: mol_type = other DNA
  misc_feature 1..24: note = RNA
  misc_feature 25: note = DNA
ctgtatcctgtttgctattacttgt

SEQ ID NO: 330 - DNA, 25 bp, synthetic construct
  source 1..25: mol_type = other DNA
  misc_feature 1..23: note = RNA
  misc_feature 24..25: note = DNA
tgtatcctgtttgctattgattgtt

SEQ ID NO: 331 - DNA, 25 bp, synthetic construct
  source 1..25: mol_type = other DNA
  misc_feature 1..23: note = RNA
  misc_feature 24: note = DNA
  misc_feature 25: note = RNA
gtatcctgtttgctattgcatgttg

SEQ ID NO: 332 - DNA, 25 bp, synthetic construct
  source 1..25: mol_type = other DNA
  misc_feature 1..23: note = RNA
  misc_feature 24: note = DNA
  misc_feature 25: note = RNA
atcctgtttgctattgcttattgtg

SEQ ID NO: 333 - DNA, 25 bp, synthetic construct
  source 1..25: mol_type = other DNA
  misc_feature 1..23: note = RNA
  misc_feature 24: note = DNA
  misc_feature 25: note = RNA
gcctcgtaacccttttcataatttc

SEQ ID NO: 334 - DNA, 25 bp, synthetic construct
  source 1..25: mol_type = other DNA
  misc_feature 1..23: note = RNA
  misc_feature 24: note = DNA
  misc_feature 25: note = RNA
gagtttgccatgttgagcaagacta

SEQ ID NO: 335 - DNA, 25 bp, synthetic construct
  source 1..25: mol_type = other DNA
  misc_feature 1..24: note = RNA
  misc_feature 25: note = DNA
agtttgccatgttgagcagaactat

SEQ ID NO: 336 - DNA, 25 bp, synthetic construct
  source 1..25: mol_type = other DNA
  misc_feature 1..23: note = RNA
  misc_feature 24..25: note = DNA
tttgccatgttgagcaggaatattt

SEQ ID NO: 337 - RNA, 25 nt, synthetic construct
  source 1..25: mol_type = other RNA
ccatgatttcttcggtaatactgag

SEQ ID NO: 338 - DNA, 25 bp, synthetic construct
  source 1..25: mol_type = other DNA
  misc_feature 1..24: note = RNA
  misc_feature 25: note = DNA
gctttctgtctgtgaatgtatatat

SEQ ID NO: 339 - DNA, 25 bp, synthetic construct
  source 1..25: mol_type = other DNA
  misc_feature 1..23: note = RNA
  misc_feature 24: note = DNA
  misc_feature 25: note = RNA
ctttctgtctgtgaatgtcaatata

SEQ ID NO: 340 - DNA, 25 bp, synthetic construct
  source 1..25: mol_type = other DNA
  misc_feature 1..24: note = RNA
  misc_feature 25: note = DNA
gtctgtgaatgtctatataatgtat

SEQ ID NO: 341 - DNA, 25 bp, synthetic construct
  source 1..25: mol_type = other DNA
  misc_feature 1..23: note = RNA
  misc_feature 24..25: note = DNA
tctgtgaatgtctatatagagtatt

SEQ ID NO: 342 - DNA, 25 bp, synthetic construct
  source 1..25: mol_type = other DNA
  misc_feature 1..23: note = RNA
  misc_feature 24: note = DNA
  misc_feature 25: note = RNA
ctgtgaatgtctatatagtatattg

SEQ ID NO: 343 - DNA, 25 bp, synthetic construct
  source 1..25: mol_type = other DNA
  misc_feature 1..24: note = RNA
  misc_feature 25: note = DNA
tgtgaatgtctatatagtgaattgt

SEQ ID NO: 344 - DNA, 25 bp, synthetic construct
  source 1..25: mol_type = other DNA
  misc_feature 1..23: note = RNA
  misc_feature 24: note = DNA
  misc_feature 25: note = RNA
gtgaatgtctatatagtgtattgtg

SEQ ID NO: 345 - DNA, 25 bp, synthetic construct
  source 1..25: mol_type = other DNA
  misc_feature 1..24: note = RNA
  misc_feature 25: note = DNA
tgaatgtctatatagtgtaatgtgt

SEQ ID NO: 346 - DNA, 25 bp, synthetic construct
  source 1..25: mol_type = other DNA
  misc_feature 1..24: note = RNA
  misc_feature 25: note = DNA
aatgtctatatagtgtattatgtgt

SEQ ID NO: 347 - DNA, 25 bp, synthetic construct
  source 1..25: mol_type = other DNA
  misc_feature 1..23: note = RNA
  misc_feature 24..25: note = DNA
gtctatatagtgtattgtgagtttt

SEQ ID NO: 348 - DNA, 25 bp, synthetic construct
  source 1..25: mol_type = other DNA
  misc_feature 1..23: note = RNA
  misc_feature 24: note = DNA
  misc_feature 25: note = RNA
tctatatagtgtattgtgtatttta

SEQ ID NO: 349 - RNA, 25 nt, synthetic construct
  source 1..25: mol_type = other RNA
ctatatagtgtattgtgtgatttaa

SEQ ID NO: 350 - RNA, 25 nt, synthetic construct
  source 1..25: mol_type = other RNA
tatatagtgtattgtgtgtattaac

SEQ ID NO: 351 - RNA, 25 nt, synthetic construct
  source 1..25: mol_type = other RNA
atatagtgtattgtgtgttataaca

SEQ ID NO: 352 - RNA, 25 nt, synthetic construct
  source 1..25: mol_type = other RNA
tatagtgtattgtgtgtttaaacaa

SEQ ID NO: 353 - RNA, 25 nt, synthetic construct
  source 1..25: mol_type = other RNA
atagtgtattgtgtgttttaacaaa

SEQ ID NO: 354 - DNA, 25 bp, synthetic construct
  source 1..25: mol_type = other DNA
  misc_feature 1..24: note = RNA
  misc_feature 25: note = DNA
tagtgtattgtgtgttttaacaaat

SEQ ID NO: 355 - DNA, 25 bp, synthetic construct
  source 1..25: mol_type = other DNA
  misc_feature 1..23: note = RNA
  misc_feature 24: note = DNA
  misc_feature 25: note = RNA
agtgtattgtgtgttttaaaaaatg

SEQ ID NO: 356 - RNA, 25 nt, synthetic construct
  source 1..25: mol_type = other RNA
gtgtattgtgtgttttaacaaatga

SEQ ID NO: 357 - DNA, 25 bp, synthetic construct
  source 1..25: mol_type = other DNA
  misc_feature 1..24: note = RNA
  misc_feature 25: note = DNA
tgtattgtgtgttttaacaaatgat

SEQ ID NO: 358 - DNA, 25 bp, synthetic construct
  source 1..25: mol_type = other DNA
  misc_feature 1..23: note = RNA
  misc_feature 24..25: note = DNA
gtattgtgtgttttaacaaatgatt

SEQ ID NO: 359 - DNA, 25 bp, synthetic construct
  source 1..25: mol_type = other DNA
  misc_feature 1..23: note = RNA
  misc_feature 24..25: note = DNA
tattgtgtgttttaacaaaagattt

SEQ ID NO: 360 - DNA, 25 bp, synthetic construct
  source 1..25: mol_type = other DNA
  misc_feature 1..23: note = RNA
  misc_feature 24: note = DNA
  misc_feature 25: note = RNA
attgtgtgttttaacaaataattta

SEQ ID NO: 361 - RNA, 25 nt, synthetic construct
  source 1..25: mol_type = other RNA
ttgtgtgttttaacaaatgatttac

SEQ ID NO: 362 - RNA, 25 nt, synthetic construct
  source 1..25: mol_type = other RNA
tgtgtgttttaacaaatgaattaca

SEQ ID NO: 363 - RNA, 25 nt, synthetic construct
  source 1..25: mol_type = other RNA
gtgtgttttaacaaatgatatacac

SEQ ID NO: 364 - DNA, 25 bp, synthetic construct
  source 1..25: mol_type = other DNA
  misc_feature 1..24: note = RNA
  misc_feature 25: note = DNA
tgtgttttaacaaatgattaacact

SEQ ID NO: 365 - DNA, 25 bp, synthetic construct
  source 1..25: mol_type = other DNA
  misc_feature 1..23: note = RNA
  misc_feature 24: note = DNA
  misc_feature 25: note = RNA
gtgttttaacaaatgatttacactg

SEQ ID NO: 366 - RNA, 25 nt, synthetic construct
  source 1..25: mol_type = other RNA
tgttttaacaaatgatttaaactga

SEQ ID NO: 367 - RNA, 25 nt, synthetic construct
  source 1..25: mol_type = other RNA
gttttaacaaatgatttacactgac

SEQ ID NO: 368 - DNA, 25 bp, synthetic construct
  source 1..25: mol_type = other DNA
  misc_feature 1..24: note = RNA
  misc_feature 25: note = DNA
ttttaacaaatgatttacaatgact

SEQ ID NO: 369 - DNA, 25 bp, synthetic construct
  source 1..25: mol_type = other DNA
  misc_feature 1..23: note = RNA
  misc_feature 24..25: note = DNA
taacaaatgatttacactgactgtt

SEQ ID NO: 370 - DNA, 25 bp, synthetic construct
  source 1..25: mol_type = other DNA
  misc_feature 1..23: note = RNA
  misc_feature 24: note = DNA
  misc_feature 25: note = RNA
aacaaatgatttacactgaatgttg

SEQ ID NO: 371 - RNA, 25 nt, synthetic construct
  source 1..25: mol_type = other RNA
acaaatgatttacactgacagttgc

SEQ ID NO: 372 - DNA, 25 bp, synthetic construct
  source 1..25: mol_type = other DNA
  misc_feature 1..24: note = RNA
  misc_feature 25: note = DNA
caaatgatttacactgactattgct

SEQ ID NO: 373 - DNA, 25 bp, synthetic construct
  source 1..25: mol_type = other DNA
  misc_feature 1..24: note = RNA
  misc_feature 25: note = DNA
aatgatttacactgactgtagctgt

SEQ ID NO: 374 - DNA, 25 bp, synthetic construct
  source 1..25: mol_type = other DNA
  misc_feature 1..23: note = RNA
  misc_feature 24: note = DNA
  misc_feature 25: note = RNA
atgatttacactgactgttactgta

SEQ ID NO: 375 - RNA, 25 nt, synthetic construct
  source 1..25: mol_type = other RNA
tgatttacactgactgttgatgtaa

SEQ ID NO: 376 - RNA, 25 nt, synthetic construct
  source 1..25: mol_type = other RNA
gatttacactgactgttgcagtaaa

SEQ ID NO: 377 - RNA, 25 nt, synthetic construct
  source 1..25: mol_type = other RNA
atttacactgactgttgctataaaa

SEQ ID NO: 378 - DNA, 25 bp, synthetic construct
  source 1..25: mol_type = other DNA
  misc_feature 1..23: note = RNA
  misc_feature 24..25: note = DNA
tgactgttgctgtaaaagtaaattt

SEQ ID NO: 379 - RNA, 25 nt, synthetic construct
  source 1..25: mol_type = other RNA
ctgttgctgtaaaagtgaaattgga

SEQ ID NO: 380 - RNA, 25 nt, synthetic construct
  source 1..25: mol_type = other RNA
tgttgctgtaaaagtgaatatggaa

SEQ ID NO: 381 - DNA, 25 bp, synthetic construct
  source 1..25: mol_type = other DNA
  misc_feature 1..24: note = RNA
  misc_feature 25: note = DNA
ttgctgtaaaagtgaatttagaaat

SEQ ID NO: 382 - DNA, 25 bp, synthetic construct
  source 1..25: mol_type = other DNA
  misc_feature 1..23: note = RNA
  misc_feature 24: note = DNA
  misc_feature 25: note = RNA
tgctgtaaaagtgaatttgaaaata

SEQ ID NO: 383 - RNA, 25 nt, synthetic construct
  source 1..25: mol_type = other RNA
gctgtaaaagtgaatttggaaataa

SEQ ID NO: 384 - RNA, 25 nt, synthetic construct
  source 1..25: mol_type = other RNA
ctgtaaaagtgaatttggaaataaa

SEQ ID NO: 385 - RNA, 27 nt, synthetic construct
  source 1..27: mol_type = other RNA
ctccctgctggtgcttcaggttctcag

SEQ ID NO: 386 - RNA, 27 nt, synthetic construct
  source 1..27: mol_type = other RNA
cctcctggctggtgcttcaggttctca

SEQ ID NO: 387 - RNA, 27 nt, synthetic construct
  source 1..27: mol_type = other RNA
ctaattagccacacttggaggtcacct

SEQ ID NO: 388 - RNA, 27 nt, synthetic construct
  source 1..27: mol_type = other RNA
ttttatttccacctggccacctcctgg

SEQ ID NO: 389 - RNA, 27 nt, synthetic construct
  source 1..27: mol_type = other RNA
gattttacttccacctggccacctcct

SEQ ID NO: 390 - RNA, 27 nt, synthetic construct
  source 1..27: mol_type = other RNA
agattttacttccacctggccacctcc

SEQ ID NO: 391 - RNA, 27 nt, synthetic construct
  source 1..27: mol_type = other RNA
cagattttacttccacctggccacctc

SEQ ID NO: 392 - RNA, 27 nt, synthetic construct
  source 1..27: mol_type = other RNA
tcagattttacttccacctggccacct

SEQ ID NO: 393 - RNA, 27 nt, synthetic construct
  source 1..27: mol_type = other RNA
ctcagtttttacttccacctggccacc

SEQ ID NO: 394 - RNA, 27 nt, synthetic construct
  source 1..27: mol_type = other RNA
tctcatattttacttccacctggccac

SEQ ID NO: 395 - RNA, 27 nt, synthetic construct
  source 1..27: mol_type = other RNA
ttctctgattttacttccacctggcca

SEQ ID NO: 396 - RNA, 27 nt, synthetic construct
  source 1..27: mol_type = other RNA
aggtctgcttgtgggtttcaatctttt

SEQ ID NO: 397 - RNA, 27 nt, synthetic construct
  source 1..27: mol_type = other RNA
aaggttagcttgtgggtttcaatcttt

SEQ ID NO: 398 - RNA, 27 nt, synthetic construct
  source 1..27: mol_type = other RNA
gaaggtcagcttgtgggtttcaatctt

SEQ ID NO: 399 - RNA, 27 nt, synthetic construct
  source 1..27: mol_type = other RNA
ggaagttcagcttgtgggtttcaatct

SEQ ID NO: 400 - RNA, 27 nt, synthetic construct
  source 1..27: mol_type = other RNA
cggaatgtcagcttgtgggtttcaatc

SEQ ID NO: 401 - RNA, 27 nt, synthetic construct
  source 1..27: mol_type = other RNA
gcggatggtcagcttgtgggtttcaat

SEQ ID NO: 402 - RNA, 27 nt, synthetic construct
  source 1..27: mol_type = other RNA
cgcggtaggtcagcttgtgggtttcaa

SEQ ID NO: 403 - RNA, 27 nt, synthetic construct
  source 1..27: mol_type = other RNA
tcgcgtaaggtcagcttgtgggtttca

SEQ ID NO: 404 - RNA, 27 nt, synthetic construct
  source 1..27: mol_type = other RNA
ctcgctgaaggtcagcttgtgggtttc

SEQ ID NO: 405 - RNA, 27 nt, synthetic construct
  source 1..27: mol_type = other RNA
ccccgtggtctgtcttggctttggcgt

SEQ ID NO: 406 - RNA, 27 nt, synthetic construct
  source 1..27: mol_type = other RNA
gccccttggtctgtcttggctttggcg

SEQ ID NO: 407 - RNA, 27 nt, synthetic construct
  source 1..27: mol_type = other RNA
caagatgcacaagtccttacaaagaga

SEQ ID NO: 408 - RNA, 27 nt, synthetic construct
  source 1..27: mol_type = other RNA
ccaagtggcacaagtccttacaaagag

SEQ ID NO: 409 - RNA, 27 nt, synthetic construct
  source 1..27: mol_type = other RNA
cccaataggcacaagtccttacaaaga

SEQ ID NO: 410 - RNA, 27 nt, synthetic construct
  source 1..27: mol_type = other RNA
tctcctaagaggcacaagtccttacaa

SEQ ID NO: 411 - RNA, 27 nt, synthetic construct
  source 1..27: mol_type = other RNA
gtctctcaagaggcacaagtccttaca

SEQ ID NO: 412 - RNA, 27 nt, synthetic construct
  source 1..27: mol_type = other RNA
cgtcttccaagaggcacaagtccttac

SEQ ID NO: 413 - RNA, 27 nt, synthetic construct
  source 1..27: mol_type = other RNA
ataaatagacaaatccaactacaactc

SEQ ID NO: 414 - RNA, 27 nt, synthetic construct
  source 1..27: mol_type = other RNA
cataatcagacaaatccaactacaact

SEQ ID NO: 415 - RNA, 27 nt, synthetic construct
  source 1..27: mol_type = other RNA
gcatatacagacaaatccaactacaac

SEQ ID NO: 416 - RNA, 27 nt, synthetic construct
  source 1..27: mol_type = other RNA
agcattaacagacaaatccaactacaa

SEQ ID NO: 417 - RNA, 27 nt, synthetic construct
  source 1..27: mol_type = other RNA
aagcataaacagacaaatccaactaca

SEQ ID NO: 418 - RNA, 27 nt, synthetic construct
  source 1..27: mol_type = other RNA
tcactttcatagtcactctggtgaatc

SEQ ID NO: 419 - RNA, 27 nt, synthetic construct
  source 1..27: mol_type = other RNA
ttcactatcatagtcactctggtgaat

SEQ ID NO: 420 - RNA, 27 nt, synthetic construct
  source 1..27: mol_type = other RNA
tttcattatcatagtcactctggtgaa

SEQ ID NO: 421 - RNA, 27 nt, synthetic construct
  source 1..27: mol_type = other RNA
ttttctctatcatagtcactctggtga

SEQ ID NO: 422 - RNA, 27 nt, synthetic construct
  source 1..27: mol_type = other RNA
ctttttactatcatagtcactctggtg

SEQ ID NO: 423 - RNA, 27 nt, synthetic construct
  source 1..27: mol_type = other RNA
tcttttcactatcatagtcactctggt

SEQ ID NO: 424 - RNA, 27 nt, synthetic construct
  source 1..27: mol_type = other RNA
ttcttttcactatcatagtcactctgg

SEQ ID NO: 425 - RNA, 27 nt, synthetic construct
  source 1..27: mol_type = other RNA
tttcttttcactatcatagtcactctg

SEQ ID NO: 426 - RNA, 27 nt, synthetic construct
  source 1..27: mol_type = other RNA
ttttcttttcactatcatagtcactct

SEQ ID NO: 427 - RNA, 27 nt, synthetic construct
  source 1..27: mol_type = other RNA
ttttttttttcactatcatagtcactc

SEQ ID NO: 428 - RNA, 27 nt, synthetic construct
  source 1..27: mol_type = other RNA
ttttttcttttcactatcatagtcact

SEQ ID NO: 429 - RNA, 27 nt, synthetic construct
  source 1..27: mol_type = other RNA
tttttttcttttcactatcatagtcac

SEQ ID NO: 430 - RNA, 27 nt, synthetic construct
  source 1..27: mol_type = other RNA
ttttttttcttttcactatcatagtca

SEQ ID NO: 431 - RNA, 27 nt, synthetic construct
  source 1..27: mol_type = other RNA
tttttttttcttttcactatcatagtc

SEQ ID NO: 432 - RNA, 27 nt, synthetic construct
  source 1..27: mol_type = other RNA
ttttttttttcttttcactatcatagt

SEQ ID NO: 433 - RNA, 27 nt, synthetic construct
  source 1..27: mol_type = other RNA
tcaagttacatgcgtcctttttttttt

SEQ ID NO: 434 - RNA, 27 nt, synthetic construct
  source 1..27: mol_type = other RNA
ttcaatatacatgcgtccttttttttt

SEQ ID NO: 435 - RNA, 27 nt, synthetic construct
  source 1..27: mol_type = other RNA
tttcatgatacatgcgtcctttttttt

SEQ ID NO: 436 - RNA, 27 nt, synthetic construct
  source 1..27: mol_type = other RNA
atttctagatacatgcgtccttttttt

SEQ ID NO: 437 - RNA, 27 nt, synthetic construct
  source 1..27: mol_type = other RNA
cattttaagatacatgcgtcctttttt

SEQ ID NO: 438 - RNA, 27 nt, synthetic construct
  source 1..27: mol_type = other RNA
gcatttcaagatacatgcgtccttttt

SEQ ID NO: 439 - RNA, 27 nt, synthetic construct
  source 1..27: mol_type = other RNA
agcatttcaagatacatgcgtcctttt

SEQ ID NO: 440 - RNA, 27 nt, synthetic construct
  source 1..27: mol_type = other RNA
aagcatttcaagatacatgcgtccttt

SEQ ID NO: 441 - RNA, 27 nt, synthetic construct
  source 1..27: mol_type = other RNA
caagcttttcaagatacatgcgtcctt

SEQ ID NO: 442 - RNA, 27 nt, synthetic construct
  source 1..27: mol_type = other RNA
acaagtatttcaagatacatgcgtcct

SEQ ID NO: 443 - RNA, 27 nt, synthetic construct
  source 1..27: mol_type = other RNA
ttaaatggaactattgataaagtgagt

SEQ ID NO: 444 - RNA, 27 nt, synthetic construct
  source 1..27: mol_type = other RNA
tttaattggaactattgataaagtgag

SEQ ID NO: 445 - RNA, 27 nt, synthetic construct
  source 1..27: mol_type = other RNA
atttatatggaactattgataaagtga

SEQ ID NO: 446 - RNA, 27 nt, synthetic construct
  source 1..27: mol_type = other RNA
aattttaatggaactattgataaagtg

SEQ ID NO: 447 - RNA, 27 nt, synthetic construct
  source 1..27: mol_type = other RNA
caatttaaatggaactattgataaagt

SEQ ID NO: 448 - RNA, 27 nt, synthetic construct
  source 1..27: mol_type = other RNA
tcaatttaaatggaactattgataaag

SEQ ID NO: 449 - RNA, 27 nt, synthetic construct
  source 1..27: mol_type = other RNA
gtcaatttaaatggaactattgataaa

SEQ ID NO: 450 - RNA, 27 nt, synthetic construct
  source 1..27: mol_type = other RNA
agtcattttaaatggaactattgataa

SEQ ID NO: 451 - RNA, 27 nt, synthetic construct
  source 1..27: mol_type = other RNA
aagtctatttaaatggaactattgata

SEQ ID NO: 452 - RNA, 27 nt, synthetic construct
  source 1..27: mol_type = other RNA
gaagttaatttaaatggaactattgat

SEQ ID NO: 453 - RNA, 27 nt, synthetic construct
  source 1..27: mol_type = other RNA
tgaagtcaatttaaatggaactattga

SEQ ID NO: 454 - RNA, 27 nt, synthetic construct
  source 1..27: mol_type = other RNA
ctgaattcaatttaaatggaactattg

SEQ ID NO: 455 - RNA, 27 nt, synthetic construct
  source 1..27: mol_type = other RNA
actgatgtcaatttaaatggaactatt

SEQ ID NO: 456 - RNA, 27 nt, synthetic construct
  source 1..27: mol_type = other RNA
cactgtagtcaatttaaatggaactat

SEQ ID NO: 457 - RNA, 27 nt, synthetic construct
  source 1..27: mol_type = other RNA
ccacttaagtcaatttaaatggaacta

SEQ ID NO: 458 - RNA, 27 nt, synthetic construct
  source 1..27: mol_type = other RNA
accactgaagtcaatttaaatggaact

SEQ ID NO: 459 - RNA, 27 nt, synthetic construct
  source 1..27: mol_type = other RNA
caccattgaagtcaatttaaatggaac

SEQ ID NO: 460 - RNA, 27 nt, synthetic construct
  source 1..27: mol_type = other RNA
ccgaataaatcatgggacttgcaagtg

SEQ ID NO: 461 - RNA, 27 nt, synthetic construct
  source 1..27: mol_type = other RNA
accgatgaaatcatgggacttgcaagt

SEQ ID NO: 462 - RNA, 27 nt, synthetic construct
  source 1..27: mol_type = other RNA
taccgtagaaatcatgggacttgcaag

SEQ ID NO: 463 - RNA, 27 nt, synthetic construct
  source 1..27: mol_type = other RNA
ttacctaagaaatcatgggacttgcaa

SEQ ID NO: 464 - RNA, 27 nt, synthetic construct
  source 1..27: mol_type = other RNA
actttttttccaaattcacttttacag

SEQ ID NO: 465 - RNA, 27 nt, synthetic construct
  source 1..27: mol_type = other RNA
aactttatttccaaattcacttttaca

SEQ ID NO: 466 - RNA, 27 nt, synthetic construct
  source 1..27: mol_type = other RNA
taactttatttccaaattcacttttac

SEQ ID NO: 467 - RNA, 27 nt, synthetic construct
  source 1..27: mol_type = other RNA
ataactttatttccaaattcactttta

SEQ ID NO: 468 - RNA, 27 nt, synthetic construct
  source 1..27: mol_type = other RNA
aataattttatttccaaattcactttt

SEQ ID NO: 469 - RNA, 27 nt, synthetic construct
  source 1..27: mol_type = other RNA
taatatctttatttccaaattcacttt

SEQ ID NO: 470 - RNA, 27 nt, synthetic construct
  source 1..27: mol_type = other RNA
gtaattactttatttccaaattcactt

SEQ ID NO: 471 - RNA, 27 nt, synthetic construct
  source 1..27: mol_type = other RNA
agtaataactttatttccaaattcact

SEQ ID NO: 472 - RNA, 27 nt, synthetic construct
  source 1..27: mol_type = other RNA
gagtattaactttatttccaaattcac

SEQ ID NO: 473 - RNA, 27 nt, synthetic construct
  source 1..27: mol_type = other RNA
agagttataactttatttccaaattca

SEQ ID NO: 474 - RNA, 27 nt, synthetic construct
  source 1..27: mol_type = other RNA
cagagtaataactttatttccaaattc

SEQ ID NO: 475 - RNA, 27 nt, synthetic construct
  source 1..27: mol_type = other RNA
tcagattaataactttatttccaaatt

SEQ ID NO: 476 - RNA, 27 nt, synthetic construct
  source 1..27: mol_type = other RNA
atcagtgtaataactttatttccaaat

SEQ ID NO: 477 - RNA, 27 nt, synthetic construct
  source 1..27: mol_type = other RNA
aatcatagtaataactttatttccaaa

SEQ ID NO: 478 - RNA, 27 nt, synthetic construct
  source 1..27: mol_type = other RNA
taatctgagtaataactttatttccaa

SEQ ID NO: 479 - RNA, 27 nt, synthetic construct
  source 1..27: mol_type = other RNA
ttaattagagtaataactttatttcca

SEQ ID NO: 480 - RNA, 27 nt, synthetic construct
  source 1..27: mol_type = other RNA
tttaatcagagtaataactttatttcc

SEQ ID NO: 481 - RNA, 27 nt, synthetic construct
  source 1..27: mol_type = other RNA
tgatcttccatcacttcgaactcctgg

SEQ ID NO: 482 - RNA, 27 nt, synthetic construct
  source 1..27: mol_type = other RNA
gtgattttccatcacttcgaactcctg

SEQ ID NO: 483 - RNA, 27 nt, synthetic construct
  source 1..27: mol_type = other RNA
cgtgatcttccatcacttcgaactcct

SEQ ID NO: 484 - RNA, 27 nt, synthetic construct
  source 1..27: mol_type = other RNA
agcgttatcttccatcacttcgaactc

SEQ ID NO: 485 - RNA, 27 nt, synthetic construct
  source 1..27: mol_type = other RNA
ccagcttgatcttccatcacttcgaac

SEQ ID NO: 486 - RNA, 27 nt, synthetic construct
  source 1..27: mol_type = other RNA
acgtctcagcgtgatcttccatcactt

SEQ ID NO: 487 - RNA, 27 nt, synthetic construct
  source 1..27: mol_type = other RNA
ctttcttgtcccccaacccgtacgtcc

SEQ ID NO: 488 - RNA, 27 nt, synthetic construct
  source 1..27: mol_type = other RNA
ctgatttttcctgtcccccaacccgta

SEQ ID NO: 489 - RNA, 27 nt, synthetic construct
  source 1..27: mol_type = other RNA
cgtccttgtcaccctcttggtcttggt

SEQ ID NO: 490 - RNA, 27 nt, synthetic construct
  source 1..27: mol_type = other RNA
cacgttaccagcagcttcgtcttccag

SEQ ID NO: 491 - RNA, 27 nt, synthetic construct
  source 1..27: mol_type = other RNA
tcacgtgaccagcagcttcgtcttcca

SEQ ID NO: 492 - RNA, 27 nt, synthetic construct
  source 1..27: mol_type = other RNA
gtcacttgaccagcagcttcgtcttcc

SEQ ID NO: 493 - RNA, 27 nt, synthetic construct
  source 1..27: mol_type = other RNA
tgggttacgtgaccagcagcttcgtct

SEQ ID NO: 494 - RNA, 27 nt, synthetic construct
  source 1..27: mol_type = other RNA
cttggttcacgtgaccagcagcttcgt

SEQ ID NO: 495 - RNA, 27 nt, synthetic construct
  source 1..27: mol_type = other RNA
tcttgtgtcacgtgaccagcagcttcg

SEQ ID NO: 496 - RNA, 27 nt, synthetic construct
  source 1..27: mol_type = other RNA
cgtctttgcttttactgaccatgcgag

SEQ ID NO: 497 - RNA, 27 nt, synthetic construct
  source 1..27: mol_type = other RNA
ccgtctttgcttttactgaccatgcga

SEQ ID NO: 498 - RNA, 27 nt, synthetic construct
  source 1..27: mol_type = other RNA
gtcccttctttgcttttactgaccatg

SEQ ID NO: 499 - RNA, 27 nt, synthetic construct
  source 1..27: mol_type = other RNA
agtcctgtctttgcttttactgaccat

SEQ ID NO: 500 - RNA, 27 nt, synthetic construct
  source 1..27: mol_type = other RNA
cagtctcgtctttgcttttactgacca

SEQ ID NO: 501 - RNA, 27 nt, synthetic construct
  source 1..27: mol_type = other RNA
ttccattcccgtctttgcttttactga

SEQ ID NO: 502 - RNA, 27 nt, synthetic construct
  source 1..27: mol_type = other RNA
cttcctgtcccgtctttgcttttactg

SEQ ID NO: 503 - RNA, 27 nt, synthetic construct
  source 1..27: mol_type = other RNA
gtcattgcttccagtcccgtctttgct

SEQ ID NO: 504 - RNA, 27 nt, synthetic construct
  source 1..27: mol_type = other RNA
ttgtcttcgcttccagtcccgtctttg

SEQ ID NO: 505 - RNA, 27 nt, synthetic construct
  source 1..27: mol_type = other RNA
tttgttatcgcttccagtcccgtcttt

SEQ ID NO: 506 - RNA, 27 nt, synthetic construct
  source 1..27: mol_type = other RNA
ttttttgtcatcgcttccagtcccgtc

SEQ ID NO: 507 - RNA, 27 nt, synthetic construct
  source 1..27: mol_type = other RNA
cttttttgtcatcgcttccagtcccgt

SEQ ID NO: 508 - RNA, 27 nt, synthetic construct
  source 1..27: mol_type = other RNA
gcttttttgtcatcgcttccagtcccg

SEQ ID NO: 509 - RNA, 27 nt, synthetic construct
  source 1..27: mol_type = other RNA
tggcttttttgtcatcgcttccagtcc

SEQ ID NO: 510 - RNA, 27 nt, synthetic construct
  source 1..27: mol_type = other RNA
ttggcttttttgtcatcgcttccagtc

SEQ ID NO: 511 - RNA, 27 nt, synthetic construct
  source 1..27: mol_type = other RNA
cttggtttttttgtcatcgcttccagt

SEQ ID NO: 512 - RNA, 27 nt, synthetic construct
  source 1..27: mol_type = other RNA
tcttgtcttttttgtcatcgcttccag

SEQ ID NO: 513 - RNA, 27 nt, synthetic construct
  source 1..27: mol_type = other RNA
gtctttgcttttttgtcatcgcttcca

SEQ ID NO: 514 - RNA, 27 nt, synthetic construct
  source 1..27: mol_type = other RNA
tgtcttggcttttttgtcatcgcttcc

SEQ ID NO: 515 - RNA, 27 nt, synthetic construct
  source 1..27: mol_type = other RNA
atgtcttggcttttttgtcatcgcttc

SEQ ID NO: 516 - RNA, 27 nt, synthetic construct
  source 1..27: mol_type = other RNA
gatgttttggcttttttgtcatcgctt

SEQ ID NO: 517 - RNA, 27 nt, synthetic construct
  source 1..27: mol_type = other RNA
gtgtgtcgatcttcgttttaccatcag

SEQ ID NO: 518 - RNA, 27 nt, synthetic construct
  source 1..27: mol_type = other RNA
ttttttctggaatcctggtggcgttgg

SEQ ID NO: 519 - RNA, 27 nt, synthetic construct
  source 1..27: mol_type = other RNA
tagtctcagagctgggtggtgtctttg

SEQ ID NO: 520 - RNA, 27 nt, synthetic construct
  source 1..27: mol_type = other RNA
gctgctatcccctgattttggaggttc

SEQ ID NO: 521 - RNA, 27 nt, synthetic construct
  source 1..27: mol_type = other RNA
acatttttcaggtctggcatgggcacg

SEQ ID NO: 522 - RNA, 27 nt, synthetic construct
  source 1..27: mol_type = other RNA
tgacattcttcaggtctggcatgggca

SEQ ID NO: 523 - RNA, 27 nt, synthetic construct
  source 1..27: mol_type = other RNA
ttgactttcttcaggtctggcatgggc

SEQ ID NO: 524 - RNA, 27 nt, synthetic construct
  source 1..27: mol_type = other RNA
cttgatattcttcaggtctggcatggg

SEQ ID NO: 525 - RNA, 27 nt, synthetic construct
  source 1..27: mol_type = other RNA
tcttgtacttgacattcttcaggtctg

SEQ ID NO: 526 - RNA, 27 nt, synthetic construct
  source 1..27: mol_type = other RNA
atctttgacttgacattcttcaggtct

SEQ ID NO: 527 - RNA, 27 nt, synthetic construct
  source 1..27: mol_type = other RNA
gatcttggacttgacattcttcaggtc

SEQ ID NO: 528 - RNA, 27 nt, synthetic construct
  source 1..27: mol_type = other RNA
cgatcttggacttgacattcttcaggt

SEQ ID NO: 529 - RNA, 27 nt, synthetic construct
  source 1..27: mol_type = other RNA
ccgattttggacttgacattcttcagg

SEQ ID NO: 530 - RNA, 27 nt, synthetic construct
  source 1..27: mol_type = other RNA
cagtgtagccgatcttggacttgacat

SEQ ID NO: 531 - RNA, 27 nt, synthetic construct
  source 1..27: mol_type = other RNA
ggctgttgcttcaggttctcagtggag

SEQ ID NO: 532 - RNA, 27 nt, synthetic construct
  source 1..27: mol_type = other RNA
cggcttgtgcttcaggttctcagtgga

SEQ ID NO: 533 - RNA, 27 nt, synthetic construct
  source 1..27: mol_type = other RNA
gtcaattggtttgtagactatttgcac

SEQ ID NO: 534 - RNA, 27 nt, synthetic construct
  source 1..27: mol_type = other RNA
ggtcatctggtttgtagactatttgca

SEQ ID NO: 535 - RNA, 27 nt, synthetic construct
  source 1..27: mol_type = other RNA
aggtctactggtttgtagactatttgc

SEQ ID NO: 536 - RNA, 27 nt, synthetic construct
  source 1..27: mol_type = other RNA
caggttaactggtttgtagactatttg

SEQ ID NO: 537 - RNA, 27 nt, synthetic construct
  source 1..27: mol_type = other RNA
tcaggtcaactggtttgtagactattt

SEQ ID NO: 538 - RNA, 27 nt, synthetic construct
  source 1..27: mol_type = other RNA
ctcagttcaactggtttgtagactatt

SEQ ID NO: 539 - RNA, 27 nt, synthetic construct
  source 1..27: mol_type = other RNA
gctcatgtcaactggtttgtagactat

SEQ ID NO: 540 - RNA, 27 nt, synthetic construct
  source 1..27: mol_type = other RNA
tgctctggtcaactggtttgtagacta

SEQ ID NO: 541 - RNA, 27 nt, synthetic construct
  source 1..27: mol_type = other RNA
ttgcttaggtcaactggtttgtagact

SEQ ID NO: 542 - RNA, 27 nt, synthetic construct
  source 1..27: mol_type = other RNA
cttgctcaggtcaactggtttgtagac

SEQ ID NO: 543 - RNA, 27 nt, synthetic construct
  source 1..27: mol_type = other RNA
ccttgttcaggtcaactggtttgtaga

SEQ ID NO: 544 - RNA, 27 nt, synthetic construct
  source 1..27: mol_type = other RNA
acctttctcaggtcaactggtttgtag

SEQ ID NO: 545 - RNA, 27 nt, synthetic construct
  source 1..27: mol_type = other RNA
caccttgctcaggtcaactggtttgta

SEQ ID NO: 546 - RNA, 27 nt, synthetic construct
  source 1..27: mol_type = other RNA
tcaccttgctcaggtcaactggtttgt

SEQ ID NO: 547 - RNA, 27 nt, synthetic construct
  source 1..27: mol_type = other RNA
gtcactttgctcaggtcaactggtttg

SEQ ID NO: 548 - RNA, 27 nt, synthetic construct
  source 1..27: mol_type = other RNA
ggtcatcttgctcaggtcaactggttt

SEQ ID NO: 549 - RNA, 27 nt, synthetic construct
  source 1..27: mol_type = other RNA
gaggttaccttgctcaggtcaactggt

SEQ ID NO: 550 - RNA, 27 nt, synthetic construct
  source 1..27: mol_type = other RNA
tggagttcaccttgctcaggtcaactg

SEQ ID NO: 551 - RNA, 27 nt, synthetic construct
  source 1..27: mol_type = other RNA
ttggatgtcaccttgctcaggtcaact

SEQ ID NO: 552 - RNA, 27 nt, synthetic construct
  source 1..27: mol_type = other RNA
acttgtaggtcaccttgctcaggtcaa

SEQ ID NO: 553 - RNA, 27 nt, synthetic construct
  source 1..27: mol_type = other RNA
cacacttggaggtcaccttgctcaggt

SEQ ID NO: 554 - RNA, 27 nt, synthetic construct
  source 1..27: mol_type = other RNA
tgagctacacttggaggtcaccttgct

SEQ ID NO: 555 - RNA, 27 nt, synthetic construct
  source 1..27: mol_type = other RNA
atgagtcacacttggaggtcaccttgc

SEQ ID NO: 556 - RNA, 27 nt, synthetic construct
  source 1..27: mol_type = other RNA
aatgatccacacttggaggtcaccttg

SEQ ID NO: 557 - RNA, 27 nt, synthetic construct
  source 1..27: mol_type = other RNA
gttgcttaatgagccacacttggaggt

SEQ ID NO: 558 - RNA, 27 nt, synthetic construct
  source 1..27: mol_type = other RNA
tgatgtatgttgcctaatgagccacac

SEQ ID NO: 559 - RNA, 27 nt, synthetic construct
  source 1..27: mol_type = other RNA
atgattgatgttgcctaatgagccaca

SEQ ID NO: 560 - RNA, 27 nt, synthetic construct
  source 1..27: mol_type = other RNA
ttatgttggatgttgcctaatgagcca

SEQ ID NO: 561 - RNA, 27 nt, synthetic construct
  source 1..27: mol_type = other RNA
tttattatggatgttgcctaatgagcc

SEQ ID NO: 562 - RNA, 27 nt, synthetic construct
  source 1..27: mol_type = other RNA
ggtttttgatggatgttgcctaatgag

SEQ ID NO: 563 - RNA, 27 nt, synthetic construct
  source 1..27: mol_type = other RNA
tggtttatgatggatgttgcctaatga

SEQ ID NO: 564 - RNA, 27 nt, synthetic construct
  source 1..27: mol_type = other RNA
ctggtttatgatggatgttgcctaatg

SEQ ID NO: 565 - RNA, 27 nt, synthetic construct
  source 1..27: mol_type = other RNA
tcctgttttatgatggatgttgcctaa

SEQ ID NO: 566 - RNA, 27 nt, synthetic construct
  source 1..27: mol_type = other RNA
caccttctggtttatgatggatgttgc

SEQ ID NO: 567 - RNA, 27 nt, synthetic construct
  source 1..27: mol_type = other RNA
cttcttagattttacttccacctggcc

SEQ ID NO: 568 - RNA, 27 nt, synthetic construct
  source 1..27: mol_type = other RNA
gcttctcagattttacttccacctggc

SEQ ID NO: 569 - RNA, 27 nt, synthetic construct
  source 1..27: mol_type = other RNA
agcttttcagattttacttccacctgg

SEQ ID NO: 570 - RNA, 27 nt, synthetic construct
  source 1..27: mol_type = other RNA
aagcttctcagattttacttccacctg

SEQ ID NO: 571 - RNA, 27 nt, synthetic construct
  source 1..27: mol_type = other RNA
caagcttctcagattttacttccacct

SEQ ID NO: 572 - RNA, 27 nt, synthetic construct
  source 1..27: mol_type = other RNA
tcaagtttctcagattttacttccacc

SEQ ID NO: 573 - RNA, 27 nt, synthetic construct
  source 1..27: mol_type = other RNA
gtcaatcttctcagattttacttccac

SEQ ID NO: 574 - RNA, 27 nt, synthetic construct
  source 1..27: mol_type = other RNA
agtcatgcttctcagattttacttcca

SEQ ID NO: 575 - RNA, 27 nt, synthetic construct
  source 1..27: mol_type = other RNA
aagtctagcttctcagattttacttcc

SEQ ID NO: 576 - RNA, 27 nt, synthetic construct
  source 1..27: mol_type = other RNA
gaagttaagcttctcagattttacttc

SEQ ID NO: 577 - RNA, 27 nt, synthetic construct
  source 1..27: mol_type = other RNA
tgtccttgaagtcaagcttctcagatt

SEQ ID NO: 578 - RNA, 27 nt, synthetic construct
  source 1..27: mol_type = other RNA
ctgtctttgaagtcaagcttctcagat

SEQ ID NO: 579 - RNA, 27 nt, synthetic construct
  source 1..27: mol_type = other RNA
tctgttcttgaagtcaagcttctcaga

SEQ ID NO: 580 - RNA, 27 nt, synthetic construct
  source 1..27: mol_type = other RNA
ctctgtccttgaagtcaagcttctcag

SEQ ID NO: 581 - RNA, 27 nt, synthetic construct
  source 1..27: mol_type = other RNA
actctttccttgaagtcaagcttctca

SEQ ID NO: 582 - RNA, 27 nt, synthetic construct
  source 1..27: mol_type = other RNA
gactctgtccttgaagtcaagcttctc

SEQ ID NO: 583 - RNA, 27 nt, synthetic construct
  source 1..27: mol_type = other RNA
ggactttgtccttgaagtcaagcttct

SEQ ID NO: 584 - RNA, 27 nt, synthetic construct
  source 1..27: mol_type = other RNA
tggactctgtccttgaagtcaagcttc

SEQ ID NO: 585 - RNA, 27 nt, synthetic construct
  source 1..27: mol_type = other RNA
ctggattctgtccttgaagtcaagctt

SEQ ID NO: 586 - RNA, 27 nt, synthetic construct
  source 1..27: mol_type = other RNA
actggtctctgtccttgaagtcaagct

SEQ ID NO: 587 - RNA, 27 nt, synthetic construct
  source 1..27: mol_type = other RNA
gactgtactctgtccttgaagtcaagc

SEQ ID NO: 588 - RNA, 27 nt, synthetic construct
  source 1..27: mol_type = other RNA
caatcttcgactggactctgtccttga

SEQ ID NO: 589 - RNA, 27 nt, synthetic construct
  source 1..27: mol_type = other RNA
ccaattttcgactggactctgtccttg

SEQ ID NO: 590 - RNA, 27 nt, synthetic construct
  source 1..27: mol_type = other RNA
cgtggttgatattgtccagggacccaa

SEQ ID NO: 591 - RNA, 27 nt, synthetic construct
  source 1..27: mol_type = other RNA
tgggtttcaatctttttatttcctccg

SEQ ID NO: 592 - RNA, 27 nt, synthetic construct
  source 1..27: mol_type = other RNA
gtgggtttcaatctttttatttcctcc

SEQ ID NO: 593 - RNA, 27 nt, synthetic construct
  source 1..27: mol_type = other RNA
tgtggttttcaatctttttatttcctc

SEQ ID NO: 594 - RNA, 27 nt, synthetic construct
  source 1..27: mol_type = other RNA
ttgtgtgtttcaatctttttatttcct

SEQ ID NO: 595 - RNA, 27 nt, synthetic construct
  source 1..27: mol_type = other RNA
cttgttggtttcaatctttttatttcc

SEQ ID NO: 596 - RNA, 27 nt, synthetic construct
  source 1..27: mol_type = other RNA
gcttgtgggtttcaatctttttatttc

SEQ ID NO: 597 - RNA, 27 nt, synthetic construct
  source 1..27: mol_type = other RNA
agcttttgggtttcaatctttttattt

SEQ ID NO: 598 - RNA, 27 nt, synthetic construct
  source 1..27: mol_type = other RNA
tcagcttgtgggtttcaatctttttat

SEQ ID NO: 599 - RNA, 27 nt, synthetic construct
  source 1..27: mol_type = other RNA
gtcagtttgtgggtttcaatcttttta

SEQ ID NO: 600 - RNA, 27 nt, synthetic construct
  source 1..27: mol_type = other RNA
tggagtagacattgctgagatgccgtg

SEQ ID NO: 601 - RNA, 27 nt, synthetic construct
  source 1..27: mol_type = other RNA
tggggtgagtctaccatgtcgatgctg

SEQ ID NO: 602 - RNA, 27 nt, synthetic construct
  source 1..27: mol_type = other RNA
ctgattacaaaccctgcttggccaggg

SEQ ID NO: 603 - RNA, 27 nt, synthetic construct
  source 1..27: mol_type = other RNA
attattctttttttttccacactctct

SEQ ID NO: 604 - RNA, 27 nt, synthetic construct
  source 1..27: mol_type = other RNA
cattattctttttttttccacactctc

SEQ ID NO: 605 - RNA, 27 nt, synthetic construct
  source 1..27: mol_type = other RNA
gtcattattctttttttttccacactc

SEQ ID NO: 606 - RNA, 27 nt, synthetic construct
  source 1..27: mol_type = other RNA
gtgattaaccaattaaccgaactgcga

SEQ ID NO: 607 - RNA, 27 nt, synthetic construct
  source 1..27: mol_type = other RNA
gaaaatagaatcaaaaggaattgcctg

SEQ ID NO: 608 - RNA, 27 nt, synthetic construct
  source 1..27: mol_type = other RNA
accaattttcaaatcctttgttgctgc

SEQ ID NO: 609 - RNA, 27 nt, synthetic construct
  source 1..27: mol_type = other RNA
acacatcaagtttcaaatcctttgttg

SEQ ID NO: 610 - RNA, 27 nt, synthetic construct
  source 1..27: mol_type = other RNA
gaacataccaagtttcaaatcctttgt

SEQ ID NO: 611 - RNA, 27 nt, synthetic construct
  source 1..27: mol_type = other RNA
acgaatacaccaagtttcaaatccttt

SEQ ID NO: 612 - RNA, 27 nt, synthetic construct
  source 1..27: mol_type = other RNA
tcacattcacacaaggttgacatcgtc

SEQ ID NO: 613 - RNA, 27 nt, synthetic construct
  source 1..27: mol_type = other RNA
tctcatgacatcaaggtcagtcttttc

SEQ ID NO: 614 - RNA, 27 nt, synthetic construct
  source 1..27: mol_type = other RNA
tcaattaaacagggtttctgtggagca

SEQ ID NO: 615 - RNA, 27 nt, synthetic construct
  source 1..27: mol_type = other RNA
actcattaaaacagggtttctgtggag

SEQ ID NO: 616 - RNA, 27 nt, synthetic construct
  source 1..27: mol_type = other RNA
aactctataaaacagggtttctgtgga

SEQ ID NO: 617 - RNA, 27 nt, synthetic construct
  source 1..27: mol_type = other RNA
gaacttaataaaacagggtttctgtgg

SEQ ID NO: 618 - RNA, 27 nt, synthetic construct
  source 1..27: mol_type = other RNA
agaactcaataaaacagggtttctgtg

SEQ ID NO: 619 - RNA, 27 nt, synthetic construct
  source 1..27: mol_type = other RNA
cagaattcaataaaacagggtttctgt

SEQ ID NO: 620 - RNA, 27 nt, synthetic construct
  source 1..27: mol_type = other RNA
tcagatctcaataaaacagggtttctg

SEQ ID NO: 621 - RNA, 27 nt, synthetic construct
  source 1..27: mol_type = other RNA
ttcagtactcaataaaacagggtttct

SEQ ID NO: 622 - RNA, 27 nt, synthetic construct
  source 1..27: mol_type = other RNA
cttcataactcaataaaacagggtttc

SEQ ID NO: 623 - RNA, 27 nt, synthetic construct
  source 1..27: mol_type = other RNA
ccttctgaactcaataaaacagggttt

SEQ ID NO: 624 - RNA, 27 nt, synthetic construct
  source 1..27: mol_type = other RNA
acctttagaactcaataaaacagggtt

SEQ ID NO: 625 - RNA, 27 nt, synthetic construct
  source 1..27: mol_type = other RNA
aaccttcagaactcaataaaacagggt

SEQ ID NO: 626 - RNA, 27 nt, synthetic construct
  source 1..27: mol_type = other RNA
caaccttcagaactcaataaaacaggg

SEQ ID NO: 627 - RNA, 27 nt, synthetic construct
  source 1..27: mol_type = other RNA
ccaactttcagaactcaataaaacagg

SEQ ID NO: 628 - RNA, 27 nt, synthetic construct
  source 1..27: mol_type = other RNA
ttccatccttcagaactcaataaaaca

SEQ ID NO: 629 - RNA, 27 nt, synthetic construct
  source 1..27: mol_type = other RNA
agttctaaccttcagaactcaataaaa

SEQ ID NO: 630 - RNA, 27 nt, synthetic construct
  source 1..27: mol_type = other RNA
gcagttccaaccttcagaactcaataa

SEQ ID NO: 631 - RNA, 27 nt, synthetic construct
  source 1..27: mol_type = other RNA
agcagttccaaccttcagaactcaata

SEQ ID NO: 632 - RNA, 27 nt, synthetic construct
  source 1..27: mol_type = other RNA
caagttcttacaaagagaactggttag

SEQ ID NO: 633 - RNA, 27 nt, synthetic construct
  source 1..27: mol_type = other RNA
acaagtccttacaaagagaactggtta

SEQ ID NO: 634 - RNA, 27 nt, synthetic construct
  source 1..27: mol_type = other RNA
cacaattccttacaaagagaactggtt

SEQ ID NO: 635 - RNA, 27 nt, synthetic construct
  source 1..27: mol_type = other RNA
gcacatgtccttacaaagagaactggt

SEQ ID NO: 636 - RNA, 27 nt, synthetic construct
  source 1..27: mol_type = other RNA
taatttcaccctcagtatggagtaggt

SEQ ID NO: 637 - RNA, 27 nt, synthetic construct
  source 1..27: mol_type = other RNA
ttaatttcaccctcagtatggagtagg

SEQ ID NO: 638 - RNA, 27 nt, synthetic construct
  source 1..27: mol_type = other RNA
cttaatttcaccctcagtatggagtag

SEQ ID NO: 639 - RNA, 27 nt, synthetic construct
  source 1..27: mol_type = other RNA
ccttattttcaccctcagtatggagta

SEQ ID NO: 640 - RNA, 27 nt, synthetic construct
  source 1..27: mol_type = other RNA
cttcctttaatttcaccctcagtatgg

SEQ ID NO: 641 - RNA, 27 nt, synthetic construct
  source 1..27: mol_type = other RNA
tttgctttcccttaatttcaccctcag

SEQ ID NO: 642 - RNA, 27 nt, synthetic construct
  source 1..27: mol_type = other RNA
tccatttcaacaaggcagaaacaccta

SEQ ID NO: 643 - RNA, 27 nt, synthetic construct
  source 1..27: mol_type = other RNA
ctatgtatatgttcagctgctccagca

SEQ ID NO: 644 - RNA, 27 nt, synthetic construct
  source 1..27: mol_type = other RNA
tctatttatatgttcagctgctccagc

SEQ ID NO: 645 - RNA, 27 nt, synthetic construct
  source 1..27: mol_type = other RNA
catctttgtatatgttcagctgctcca

SEQ ID NO: 646 - RNA, 27 nt, synthetic construct
  source 1..27: mol_type = other RNA
acatctatgtatatgttcagctgctcc

SEQ ID NO: 647 - RNA, 27 nt, synthetic construct
  source 1..27: mol_type = other RNA
aacatttatgtatatgttcagctgctc

SEQ ID NO: 648 - RNA, 27 nt, synthetic construct
  source 1..27: mol_type = other RNA
caacatctatgtatatgttcagctgct

SEQ ID NO: 649 - RNA, 27 nt, synthetic construct
  source 1..27: mol_type = other RNA
gcaacttctatgtatatgttcagctgc

SEQ ID NO: 650 - RNA, 27 nt, synthetic construct
  source 1..27: mol_type = other RNA
ggcaatatctatgtatatgttcagctg

SEQ ID NO: 651 - RNA, 27 nt, synthetic construct
  source 1..27: mol_type = other RNA
cagggtaacatctatgtatatgttcag

SEQ ID NO: 652 - RNA, 27 nt, synthetic construct
  source 1..27: mol_type = other RNA
gcaggtcaacatctatgtatatgttca

SEQ ID NO: 653 - RNA, 27 nt, synthetic construct
  source 1..27: mol_type = other RNA
aaacatacaaatccaactacaactcaa

SEQ ID NO: 654 - RNA, 27 nt, synthetic construct
  source 1..27: mol_type = other RNA
taaactgacaaatccaactacaactca

SEQ ID NO: 655 - RNA, 27 nt, synthetic construct
  source 1..27: mol_type = other RNA
caagcttaaacagacaaatccaactac

SEQ ID NO: 656 - RNA, 27 nt, synthetic construct
  source 1..27: mol_type = other RNA
ccaagtataaacagacaaatccaacta

SEQ ID NO: 657 - RNA, 27 nt, synthetic construct
  source 1..27: mol_type = other RNA
tccaatcataaacagacaaatccaact

SEQ ID NO: 658 - RNA, 27 nt, synthetic construct
  source 1..27: mol_type = other RNA
aatcctagcataaacagacaaatccaa

SEQ ID NO: 659 - RNA, 27 nt, synthetic construct
  source 1..27: mol_type = other RNA
gaatctaagcataaacagacaaatcca

SEQ ID NO: 660 - RNA, 27 nt, synthetic construct
  source 1..27: mol_type = other RNA
tgaattcaagcataaacagacaaatcc

SEQ ID NO: 661 - RNA, 27 nt, synthetic construct
  source 1..27: mol_type = other RNA
gtgaatccaagcataaacagacaaatc

SEQ ID NO: 662 - RNA, 27 nt, synthetic construct
  source 1..27: mol_type = other RNA
ggtgattccaagcataaacagacaaat

SEQ ID NO: 663 - RNA, 27 nt, synthetic construct
  source 1..27: mol_type = other RNA
tggtgtatccaagcataaacagacaaa

SEQ ID NO: 664 - RNA, 27 nt, synthetic construct
  source 1..27: mol_type = other RNA
ctggttaatccaagcataaacagacaa

SEQ ID NO: 665 - RNA, 27 nt, synthetic construct
  source 1..27: mol_type = other RNA
tctggtgaatccaagcataaacagaca

SEQ ID NO: 666 - RNA, 27 nt, synthetic construct
  source 1..27: mol_type = other RNA
ctctgttgaatccaagcataaacagac

SEQ ID NO: 667 - RNA, 27 nt, synthetic construct
  source 1..27: mol_type = other RNA
actcttgtgaatccaagcataaacaga

SEQ ID NO: 668 - RNA, 27 nt, synthetic construct
  source 1..27: mol_type = other RNA
tcactttggtgaatccaagcataaaca

SEQ ID NO: 669 - RNA, 27 nt, synthetic construct
  source 1..27: mol_type = other RNA
agtcattctggtgaatccaagcataaa

SEQ ID NO: 670 - RNA, 27 nt, synthetic construct
  source 1..27: mol_type = other RNA
tagtctctctggtgaatccaagcataa

SEQ ID NO: 671 - RNA, 27 nt, synthetic construct
  source 1..27: mol_type = other RNA
atagttactctggtgaatccaagcata

SEQ ID NO: 672 - RNA, 27 nt, synthetic construct
  source 1..27: mol_type = other RNA
catagtcactctggtgaatccaagcat

SEQ ID NO: 673 - RNA, 27 nt, synthetic construct
  source 1..27: mol_type = other RNA
tcatattcactctggtgaatccaagca

SEQ ID NO: 674 - RNA, 27 nt, synthetic construct
  source 1..27: mol_type = other RNA
atcattgtcactctggtgaatccaagc

SEQ ID NO: 675 - RNA, 27 nt, synthetic construct
  source 1..27: mol_type = other RNA
tatcatagtcactctggtgaatccaag

SEQ ID NO: 676 - RNA, 27 nt, synthetic construct
  source 1..27: mol_type = other RNA
ctatcttagtcactctggtgaatccaa

SEQ ID NO: 677 - RNA, 27 nt, synthetic construct
  source 1..27: mol_type = other RNA
actattatagtcactctggtgaatcca

SEQ ID NO: 678 - RNA, 27 nt, synthetic construct
  source 1..27: mol_type = other RNA
tacaatcatttcaagatacatgcgtcc

SEQ ID NO: 679 - RNA, 27 nt, synthetic construct
  source 1..27: mol_type = other RNA
ttacatgcatttcaagatacatgcgtc

SEQ ID NO: 680 - RNA, 27 nt, synthetic construct
  source 1..27: mol_type = other RNA
tttactagcatttcaagatacatgcgt

SEQ ID NO: 681 - RNA, 27 nt, synthetic construct
  source 1..27: mol_type = other RNA
ctttataagcatttcaagatacatgcg

SEQ ID NO: 682 - RNA, 27 nt, synthetic construct
  source 1..27: mol_type = other RNA
tcttttcaagcatttcaagatacatgc

SEQ ID NO: 683 - RNA, 27 nt, synthetic construct
  source 1..27: mol_type = other RNA
ctctttacaagcatttcaagatacatg

SEQ ID NO: 684 - RNA, 27 nt, synthetic construct
  source 1..27: mol_type = other RNA
cctctttacaagcatttcaagatacat

SEQ ID NO: 685 - RNA, 27 nt, synthetic construct
  source 1..27: mol_type = other RNA
acctctttacaagcatttcaagataca

SEQ ID NO: 686 - RNA, 27 nt, synthetic construct
  source 1..27: mol_type = other RNA
aacctttttacaagcatttcaagatac

SEQ ID NO: 687 - RNA, 27 nt, synthetic construct
  source 1..27: mol_type = other RNA
gaaacttctttacaagcatttcaagat

SEQ ID NO: 688 - RNA, 27 nt, synthetic construct
  source 1..27: mol_type = other RNA
tagaatcctctttacaagcatttcaag

SEQ ID NO: 689 - RNA, 27 nt, synthetic construct
  source 1..27: mol_type = other RNA
ttagatacctctttacaagcatttcaa

SEQ ID NO: 690 - RNA, 27 nt, synthetic construct
  source 1..27: mol_type = other RNA
gttagtaacctctttacaagcatttca

SEQ ID NO: 691 - RNA, 27 nt, synthetic construct
  source 1..27: mol_type = other RNA
ggttataaacctctttacaagcatttc

SEQ ID NO: 692 - RNA, 27 nt, synthetic construct
  source 1..27: mol_type = other RNA
tgggttagaaacctctttacaagcatt

SEQ ID NO: 693 - RNA, 27 nt, synthetic construct
  source 1..27: mol_type = other RNA
gtgggttagaaacctctttacaagcat

SEQ ID NO: 694 - RNA, 27 nt, synthetic construct
  source 1..27: mol_type = other RNA
atcattgcttcagtcctaatcctgtgc

SEQ ID NO: 695 - RNA, 27 nt, synthetic construct
  source 1..27: mol_type = other RNA
gacattatcgcttcagtcctaatcctg

SEQ ID NO: 696 - RNA, 27 nt, synthetic construct
  source 1..27: mol_type = other RNA
ctgaatagcagggcacaagaacttcag

SEQ ID NO: 697 - RNA, 27 nt, synthetic construct
  source 1..27: mol_type = other RNA
tattgttaaagtgagtcagcagcttga

SEQ ID NO: 698 - RNA, 27 nt, synthetic construct
  source 1..27: mol_type = other RNA
ctatttataaagtgagtcagcagcttg

SEQ ID NO: 699 - RNA, 27 nt, synthetic construct
  source 1..27: mol_type = other RNA
aactattgataaagtgagtcagcagct

SEQ ID NO: 700 - RNA, 27 nt, synthetic construct
  source 1..27: mol_type = other RNA
ggaactattgataaagtgagtcagcag

SEQ ID NO: 701 - RNA, 27 nt, synthetic construct
  source 1..27: mol_type = other RNA
tggaattattgataaagtgagtcagca

SEQ ID NO: 702 - RNA, 27 nt, synthetic construct
  source 1..27: mol_type = other RNA
atggaactattgataaagtgagtcagc

SEQ ID NO: 703 - RNA, 27 nt, synthetic construct
  source 1..27: mol_type = other RNA
aatggtactattgataaagtgagtcag

SEQ ID NO: 704 - RNA, 27 nt, synthetic construct
  source 1..27: mol_type = other RNA
aaatgtaactattgataaagtgagtca

SEQ ID NO: 705 - RNA, 27 nt, synthetic construct
  source 1..27: mol_type = other RNA
taaattgaactattgataaagtgagtc

SEQ ID NO: 706 - RNA, 27 nt, synthetic construct
  source 1..27: mol_type = other RNA
atagctaacaggatacagtctcaccac

SEQ ID NO: 707 - RNA, 27 nt, synthetic construct
  source 1..27: mol_type = other RNA
aatagtaaacaggatacagtctcacca

SEQ ID NO: 708 - RNA, 27 nt, synthetic construct
  source 1..27: mol_type = other RNA
caatatcaaacaggatacagtctcacc

SEQ ID NO: 709 - RNA, 27 nt, synthetic construct
  source 1..27: mol_type = other RNA
gcaattgcaaacaggatacagtctcac

SEQ ID NO: 710 - RNA, 27 nt, synthetic construct
  source 1..27: mol_type = other RNA
agcaatagcaaacaggatacagtctca

SEQ ID NO: 711 - RNA, 27 nt, synthetic construct
  source 1..27: mol_type = other RNA
aagcattagcaaacaggatacagtctc

SEQ ID NO: 712 - RNA, 27 nt, synthetic construct
  source 1..27: mol_type = other RNA
caagctatagcaaacaggatacagtct

SEQ ID NO: 713 - RNA, 27 nt, synthetic construct
  source 1..27: mol_type = other RNA
acaagtaatagcaaacaggatacagtc

SEQ ID NO: 714 - RNA, 27 nt, synthetic construct
  source 1..27: mol_type = other RNA
aacaatcaatagcaaacaggatacagt

SEQ ID NO: 715 - RNA, 27 nt, synthetic construct
  source 1..27: mol_type = other RNA
caacatgcaatagcaaacaggatacag

SEQ ID NO: 716 - RNA, 27 nt, synthetic construct
  source 1..27: mol_type = other RNA
cacaataagcaatagcaaacaggatac

SEQ ID NO: 717 - RNA, 27 nt, synthetic construct
  source 1..27: mol_type = other RNA
gaaattatgaaaagggttacgaggcag

SEQ ID NO: 718 - RNA, 27 nt, synthetic construct
  source 1..27: mol_type = other RNA
tagtcttgctcaacatggcaaactcat

SEQ ID NO: 719 - RNA, 27 nt, synthetic construct
  source 1..27: mol_type = other RNA
atagttctgctcaacatggcaaactca

SEQ ID NO: 720 - RNA, 27 nt, synthetic construct
  source 1..27: mol_type = other RNA
aaatattcctgctcaacatggcaaact

SEQ ID NO: 721 - RNA, 27 nt, synthetic construct
  source 1..27: mol_type = other RNA
ctcagtattaccgaagaaatcatggga

SEQ ID NO: 722 - RNA, 27 nt, synthetic construct
  source 1..27: mol_type = other RNA
atatatacattcacagacagaaagcta

SEQ ID NO: 723 - RNA, 27 nt, synthetic construct
  source 1..27: mol_type = other RNA
tatattgacattcacagacagaaagct

SEQ ID NO: 724 - RNA, 27 nt, synthetic construct
  source 1..27: mol_type = other RNA
atacattatatagacattcacagacag

SEQ ID NO: 725 - RNA, 27 nt, synthetic construct
  source 1..27: mol_type = other RNA
aatactctatatagacattcacagaca

SEQ ID NO: 726 - RNA, 27 nt, synthetic construct
  source 1..27: mol_type = other RNA
caatatactatatagacattcacagac

SEQ ID NO: 727 - RNA, 27 nt, synthetic construct
  source 1..27: mol_type = other RNA
acaattcactatatagacattcacaga

SEQ ID NO: 728 - RNA, 27 nt, synthetic construct
  source 1..27: mol_type = other RNA
cacaatacactatatagacattcacag

SEQ ID NO: 729 - RNA, 27 nt, synthetic construct
  source 1..27: mol_type = other RNA
acacattacactatatagacattcaca

SEQ ID NO: 730 - RNA, 27 nt, synthetic construct
  source 1..27: mol_type = other RNA
acacataatacactatatagacattca

SEQ ID NO: 731 - RNA, 27 nt, synthetic construct
  source 1..27: mol_type = other RNA
aaaactcacaatacactatatagacat

SEQ ID NO: 732 - RNA, 27 nt, synthetic construct
  source 1..27: mol_type = other RNA
taaaatacacaatacactatatagaca

SEQ ID NO: 733 - RNA, 27 nt, synthetic construct
  source 1..27: mol_type = other RNA
ttaaatcacacaatacactatatagac

SEQ ID NO: 734 - RNA, 27 nt, synthetic construct
  source 1..27: mol_type = other RNA
gttaatacacacaatacactatataga

SEQ ID NO: 735 - RNA, 27 nt, synthetic construct
  source 1..27: mol_type = other RNA
tgttataacacacaatacactatatag

SEQ ID NO: 736 - RNA, 27 nt, synthetic construct
  source 1..27: mol_type = other RNA
ttgtttaaacacacaatacactatata

SEQ ID NO: 737 - RNA, 27 nt, synthetic construct
  source 1..27: mol_type = other RNA
tttgttaaaacacacaatacactatat

SEQ ID NO: 738 - RNA, 27 nt, synthetic construct
  source 1..27: mol_type = other RNA
atttgttaaaacacacaatacactata

SEQ ID NO: 739 - RNA, 27 nt, synthetic construct
  source 1..27: mol_type = other RNA
cattttttaaaacacacaatacactat

SEQ ID NO: 740 - RNA, 27 nt, synthetic construct
  source 1..27: mol_type = other RNA
tcatttgttaaaacacacaatacacta

SEQ ID NO: 741 - RNA, 27 nt, synthetic construct
  source 1..27: mol_type = other RNA
atcatttgttaaaacacacaatacact

SEQ ID NO: 742 - RNA, 27 nt, synthetic construct
  source 1..27: mol_type = other RNA
aatcatttgttaaaacacacaatacac

SEQ ID NO: 743 - RNA, 27 nt, synthetic construct
  source 1..27: mol_type = other RNA
aaatcttttgttaaaacacacaataca

SEQ ID NO: 744 - RNA, 27 nt, synthetic construct
  source 1..27: mol_type = other RNA
taaattatttgttaaaacacacaatac

SEQ ID NO: 745 - RNA, 27 nt, synthetic construct
  source 1..27: mol_type = other RNA
gtaaatcatttgttaaaacacacaata

SEQ ID NO: 746 - RNA, 27 nt, synthetic construct
  source 1..27: mol_type = other RNA
tgtaattcatttgttaaaacacacaat

SEQ ID NO: 747 - RNA, 27 nt, synthetic construct
  source 1..27: mol_type = other RNA
gtgtatatcatttgttaaaacacacaa

SEQ ID NO: 748 - RNA, 27 nt, synthetic construct
  source 1..27: mol_type = other RNA
agtgttaatcatttgttaaaacacaca

SEQ ID NO: 749 - RNA, 27 nt, synthetic construct
  source 1..27: mol_type = other RNA
cagtgtaaatcatttgttaaaacacac

SEQ ID NO: 750 - RNA, 27 nt, synthetic construct
  source 1..27: mol_type = other RNA
tcagtttaaatcatttgttaaaacaca

SEQ ID NO: 751 - RNA, 27 nt, synthetic construct
  source 1..27: mol_type = other RNA
gtcagtgtaaatcatttgttaaaacac

SEQ ID NO: 752 - RNA, 27 nt, synthetic construct
  source 1..27: mol_type = other RNA
agtcattgtaaatcatttgttaaaaca

SEQ ID NO: 753 - RNA, 27 nt, synthetic construct
  source 1..27: mol_type = other RNA
aacagtcagtgtaaatcatttgttaaa

SEQ ID NO: 754 - RNA, 27 nt, synthetic construct
  source 1..27: mol_type = other RNA
caacattcagtgtaaatcatttgttaa

SEQ ID NO: 755 - RNA, 27 nt, synthetic construct
  source 1..27: mol_type = other RNA
gcaactgtcagtgtaaatcatttgtta

SEQ ID NO: 756 - RNA, 27 nt, synthetic construct
  source 1..27: mol_type = other RNA
agcaatagtcagtgtaaatcatttgtt

SEQ ID NO: 757 - RNA, 27 nt, synthetic construct
  source 1..27: mol_type = other RNA
acagctacagtcagtgtaaatcatttg

SEQ ID NO: 758 - RNA, 27 nt, synthetic construct
  source 1..27: mol_type = other RNA
tacagtaacagtcagtgtaaatcattt

SEQ ID NO: 759 - RNA, 27 nt, synthetic construct
  source 1..27: mol_type = other RNA
ttacatcaacagtcagtgtaaatcatt

SEQ ID NO: 760 - RNA, 27 nt, synthetic construct
  source 1..27: mol_type = other RNA
tttactgcaacagtcagtgtaaatcat

SEQ ID NO: 761 - RNA, 27 nt, synthetic construct
  source 1..27: mol_type = other RNA
ttttatagcaacagtcagtgtaaatca

SEQ ID NO: 762 - RNA, 27 nt, synthetic construct
  source 1..27: mol_type = other RNA
aaatttacttttacagcaacagtcagt

SEQ ID NO: 763 - RNA, 27 nt, synthetic construct
  source 1..27: mol_type = other RNA
tccaatttcacttttacagcaacagtc

SEQ ID NO: 764 - RNA, 27 nt, synthetic construct
  source 1..27: mol_type = other RNA
ttccatattcacttttacagcaacagt

SEQ ID NO: 765 - RNA, 27 nt, synthetic construct
  source 1..27: mol_type = other RNA
atttctaaattcacttttacagcaaca

SEQ ID NO: 766 - RNA, 27 nt, synthetic construct
  source 1..27: mol_type = other RNA
tattttcaaattcacttttacagcaac

SEQ ID NO: 767 - RNA, 27 nt, synthetic construct
  source 1..27: mol_type = other RNA
ttatttccaaattcacttttacagcaa

SEQ ID NO: 768 - RNA, 27 nt, synthetic construct
  source 1..27: mol_type = other RNA
tttatttccaaattcacttttacagca

SEQ ID NO: 769 - RNA, 36 nt, synthetic construct
  source 1..36: mol_type = other RNA
aaaaagattgaaacccacaagcagccgaaaggctgc

SEQ ID NO: 770 - RNA, 36 nt, synthetic construct
  source 1..36: mol_type = other RNA
cggcatctcagcaatgtctagcagccgaaaggctgc

SEQ ID NO: 771 - RNA, 36 nt, synthetic construct
  source 1..36: mol_type = other RNA
agagtgtggaaaaaaaaagagcagccgaaaggctgc

SEQ ID NO: 772 - RNA, 36 nt, synthetic construct
  source 1..36: mol_type = other RNA
aagacgaagctgctggtcaagcagccgaaaggctgc

SEQ ID NO: 773 - RNA, 36 nt, synthetic construct
  source 1..36: mol_type = other RNA
aagacgggactggaagcgaagcagccgaaaggctgc

SEQ ID NO: 774 - RNA, 36 nt, synthetic construct
  source 1..36: mol_type = other RNA
gatggtaaaacgaagatcgagcagccgaaaggctgc

SEQ ID NO: 775 - RNA, 36 nt, synthetic construct
  source 1..36: mol_type = other RNA
atagtctacaaaccagttgagcagccgaaaggctgc

SEQ ID NO: 776 - RNA, 36 nt, synthetic construct
  source 1..36: mol_type = other RNA
tagtctacaaaccagttgaagcagccgaaaggctgc

SEQ ID NO: 777 - RNA, 36 nt, synthetic construct
  source 1..36: mol_type = other RNA
gtctacaaaccagttgaccagcagccgaaaggctgc

SEQ ID NO: 778 - RNA, 36 nt, synthetic construct
  source 1..36: mol_type = other RNA
aggtgacctccaagtgtggagcagccgaaaggctgc

SEQ ID NO: 779 - RNA, 36 nt, synthetic construct
  source 1..36: mol_type = other RNA
aggaggtggccaggtggaaagcagccgaaaggctgc

SEQ ID NO: 780 - RNA, 36 nt, synthetic construct
  source 1..36: mol_type = other RNA
caggtggaagtaaaatctgagcagccgaaaggctgc

SEQ ID NO: 781 - RNA, 36 nt, synthetic construct
  source 1..36: mol_type = other RNA
aggtggaagtaaaatctgaagcagccgaaaggctgc

SEQ ID NO: 782 - RNA, 36 nt, synthetic construct
  source 1..36: mol_type = other RNA
aagtaaaatctgagaagctagcagccgaaaggctgc

SEQ ID NO: 783 - RNA, 36 nt, synthetic construct
  source 1..36: mol_type = other RNA
aagcttgacttcaaggacaagcagccgaaaggctgc

SEQ ID NO: 784 - RNA, 36 nt, synthetic construct
  source 1..36: mol_type = other RNA
aagattgaaacccacaagcagcagccgaaaggctgc

SEQ ID NO: 785 - RNA, 36 nt, synthetic construct
  source 1..36: mol_type = other RNA
gattgaaacccacaagctgagcagccgaaaggctgc

SEQ ID NO: 786 - RNA, 36 nt, synthetic construct
  source 1..36: mol_type = other RNA
agattgaaacccacaagctagcagccgaaaggctgc

SEQ ID NO: 787 - RNA, 36 nt, synthetic construct
  source 1..36: mol_type = other RNA
tggtcagtaaaagcaaagaagcagccgaaaggctgc

SEQ ID NO: 788 - RNA, 36 nt, synthetic construct
  source 1..36: mol_type = other RNA
ggaagcgatgacaaaaaagagcagccgaaaggctgc

SEQ ID NO: 789 - RNA, 36 nt, synthetic construct
  source 1..36: mol_type = other RNA
cccatgccagacctgaagaagcagccgaaaggctgc

SEQ ID NO: 790 - RNA, 36 nt, synthetic construct
  source 1..36: mol_type = other RNA
caaatagtctacaaaccagagcagccgaaaggctgc

SEQ ID NO: 791 - RNA, 36 nt, synthetic construct
  source 1..36: mol_type = other RNA
tacaaaccagttgacctgaagcagccgaaaggctgc

SEQ ID NO: 792 - RNA, 36 nt, synthetic construct
  source 1..36: mol_type = other RNA
caaaccagttgacctgagcagcagccgaaaggctgc

SEQ ID NO: 793 - RNA, 36 nt, synthetic construct
  source 1..36: mol_type = other RNA
accagttgacctgagcaagagcagccgaaaggctgc

SEQ ID NO: 794 - RNA, 36 nt, synthetic construct
  source 1..36: mol_type = other RNA
caaggtgacctccaagtgtagcagccgaaaggctgc

SEQ ID NO: 795 - RNA, 36 nt, synthetic construct
  source 1..36: mol_type = other RNA
agaagcttgacttcaaggaagcagccgaaaggctgc

SEQ ID NO: 796 - RNA, 36 nt, synthetic construct
  source 1..36: mol_type = other RNA
agcttgacttcaaggacagagcagccgaaaggctgc

SEQ ID NO: 797 - RNA, 36 nt, synthetic construct
  source 1..36: mol_type = other RNA
ttgacttcaaggacagagtagcagccgaaaggctgc

SEQ ID NO: 798 - RNA, 36 nt, synthetic construct
  source 1..36: mol_type = other RNA
aggaaataaaaagattgaaagcagccgaaaggctgc

SEQ ID NO: 799 - RNA, 36 nt, synthetic construct
  source 1..36: mol_type = other RNA
ggaaataaaaagattgaaaagcagccgaaaggctgc

SEQ ID NO: 800 - RNA, 36 nt, synthetic construct
  source 1..36: mol_type = other RNA
gaaataaaaagattgaaacagcagccgaaaggctgc

SEQ ID NO: 801 - RNA, 36 nt, synthetic construct
  source 1..36: mol_type = other RNA
aaataaaaagattgaaaccagcagccgaaaggctgc

SEQ ID NO: 802 - RNA, 36 nt, synthetic construct
  source 1..36: mol_type = other RNA
aataaaaagattgaaacccagcagccgaaaggctgc

SEQ ID NO: 803 - RNA, 36 nt, synthetic construct
  source 1..36: mol_type = other RNA
ataaaaagattgaaacccaagcagccgaaaggctgc

SEQ ID NO: 804 - RNA, 22 nt, synthetic construct
  source 1..22: mol_type = other RNA
ttgtgggtttcaatctttttgg

SEQ ID NO: 805 - RNA, 22 nt, synthetic construct
  source 1..22: mol_type = other RNA
tagacattgctgagatgccggg

SEQ ID NO: 806 - RNA, 22 nt, synthetic construct
  source 1..22: mol_type = other RNA
tctttttttttccacactctgg

SEQ ID NO: 807 - RNA, 22 nt, synthetic construct
  source 1..22: mol_type = other RNA
ttgaccagcagcttcgtcttgg

SEQ ID NO: 808 - RNA, 22 nt, synthetic construct
  source 1..22: mol_type = other RNA
ttcgcttccagtcccgtcttgg

SEQ ID NO: 809 - RNA, 22 nt, synthetic construct
  source 1..22: mol_type = other RNA
tcgatcttcgttttaccatcgg

SEQ ID NO: 810 - RNA, 22 nt, synthetic construct
  source 1..22: mol_type = other RNA
tcaactggtttgtagactatgg

SEQ ID NO: 811 - RNA, 22 nt, synthetic construct
  source 1..22: mol_type = other RNA
ttcaactggtttgtagactagg

SEQ ID NO: 812 - RNA, 22 nt, synthetic construct
  source 1..22: mol_type = other RNA
tggtcaactggtttgtagacgg

SEQ ID NO: 813 - RNA, 22 nt, synthetic construct
  source 1..22: mol_type = other RNA
tccacacttggaggtcacctgg

SEQ ID NO: 814 - RNA, 22 nt, synthetic construct
  source 1..22: mol_type = other RNA
tttccacctggccacctcctgg

SEQ ID NO: 815 - RNA, 22 nt, synthetic construct
  source 1..22: mol_type = other RNA
tcagattttacttccacctggg

SEQ ID NO: 816 - RNA, 22 nt, synthetic construct
  source 1..22: mol_type = other RNA
ttcagattttacttccacctgg

SEQ ID NO: 817 - RNA, 22 nt, synthetic construct
  source 1..22: mol_type = other RNA
tagcttctcagattttacttgg

SEQ ID NO: 818 - RNA, 22 nt, synthetic construct
  source 1..22: mol_type = other RNA
ttgtccttgaagtcaagcttgg

SEQ ID NO: 819 - RNA, 22 nt, synthetic construct
  source 1..22: mol_type = other RNA
tgcttgtgggtttcaatcttgg

SEQ ID NO: 820 - RNA, 22 nt, synthetic construct
  source 1..22: mol_type = other RNA
tcagcttgtgggtttcaatcgg

SEQ ID NO: 821 - RNA, 22 nt, synthetic construct
  source 1..22: mol_type = other RNA
tagcttgtgggtttcaatctgg

SEQ ID NO: 822 - RNA, 22 nt, synthetic construct
  source 1..22: mol_type = other RNA
ttctttgcttttactgaccagg

SEQ ID NO: 823 - RNA, 22 nt, synthetic construct
  source 1..22: mol_type = other RNA
tcttttttgtcatcgcttccgg

SEQ ID NO: 824 - RNA, 22 nt, synthetic construct
  source 1..22: mol_type = other RNA
ttcttcaggtctggcatggggg

SEQ ID NO: 825 - RNA, 22 nt, synthetic construct
  source 1..22: mol_type = other RNA
tctggtttgtagactatttggg

SEQ ID NO: 826 - RNA, 22 nt, synthetic construct
  source 1..22: mol_type = other RNA
ttcaggtcaactggtttgtagg

SEQ ID NO: 827 - RNA, 22 nt, synthetic construct
  source 1..22: mol_type = other RNA
tgctcaggtcaactggtttggg

SEQ ID NO: 828 - RNA, 22 nt, synthetic construct
  source 1..22: mol_type = other RNA
tcttgctcaggtcaactggtgg

SEQ ID NO: 829 - RNA, 22 nt, synthetic construct
  source 1..22: mol_type = other RNA
tacacttggaggtcaccttggg

SEQ ID NO: 830 - RNA, 22 nt, synthetic construct
  source 1..22: mol_type = other RNA
ttccttgaagtcaagcttctgg

SEQ ID NO: 831 - RNA, 22 nt, synthetic construct
  source 1..22: mol_type = other RNA
tctgtccttgaagtcaagctgg

SEQ ID NO: 832 - RNA, 22 nt, synthetic construct
  source 1..22: mol_type = other RNA
tactctgtccttgaagtcaagg

SEQ ID NO: 833 - RNA, 22 nt, synthetic construct
  source 1..22: mol_type = other RNA
tttcaatctttttatttcctgg

SEQ ID NO: 834 - RNA, 22 nt, synthetic construct
  source 1..22: mol_type = other RNA
ttttcaatctttttatttccgg

SEQ ID NO: 835 - RNA, 22 nt, synthetic construct
  source 1..22: mol_type = other RNA
tgtttcaatctttttatttcgg

SEQ ID NO: 836 - RNA, 22 nt, synthetic construct
  source 1..22: mol_type = other RNA
tggtttcaatctttttatttgg

SEQ ID NO: 837 - RNA, 22 nt, synthetic construct
  source 1..22: mol_type = other RNA
tgggtttcaatctttttattgg

SEQ ID NO: 838 - RNA, 22 nt, synthetic construct
  source 1..22: mol_type = other RNA
ttgggtttcaatctttttatgg

SEQ ID NO: 839 - RNA, 36 nt, synthetic construct; identical to SEQ ID NO: 769
  source 1..36: mol_type = other RNA
  modified_base 1: mod_base = OTHER; note = 2'-O-methyl modified nucleotide with phosphorothioate linkage
  modified_base 2: mod_base = OTHER; note = 2'-O-methyl modified nucleotide
  modified_base 3: mod_base = OTHER; note = 2'-fluoro modified nucleotide
  modified_base 4: mod_base = OTHER; note = 2'-O-methyl modified nucleotide
  modified_base 5: mod_base = OTHER; note = 2'-fluoro modified nucleotide
  modified_base 6: mod_base = OTHER; note = 2'-O-methyl modified nucleotide
  modified_base 7: mod_base = OTHER; note = 2'-O-methyl modified nucleotide
  modified_base 8: mod_base = OTHER; note = 2'-fluoro modified nucleotide
  modified_base 9: mod_base = OTHER; note = 2'-O-methyl modified nucleotide
  modified_base 10: mod_base = OTHER; note = 2'-fluoro modified nucleotide
  modified_base 11: mod_base = OTHER; note = 2'-O-methyl modified nucleotide
  modified_base 12: mod_base = OTHER; note = 2'-fluoro modified nucleotide
  modified_base 13: mod_base = OTHER; note = 2'-fluoro modified nucleotide
  modified_base 14: mod_base = OTHER; note = 2'-O-methyl modified nucleotide
  modified_base 15: mod_base = OTHER; note = 2'-fluoro modified nucleotide
  modified_base 16: mod_base = OTHER; note = 2'-O-methyl modified nucleotide
  modified_base 17: mod_base = OTHER; note = 2'-fluoro modified nucleotide
  modified_base 18: mod_base = OTHER; note = 2'-O-methyl modified nucleotide
  modified_base 19: mod_base = OTHER; note = 2'-O-methyl modified nucleotide
  modified_base 20: mod_base = OTHER; note = 2'-O-methyl modified nucleotide
  modified_base 21: mod_base = OTHER; note = 2'-O-methyl modified nucleotide
  modified_base 22: mod_base = OTHER; note = 2'-O-methyl modified nucleotide
  modified_base 23: mod_base = OTHER; note = 2'-O-methyl modified nucleotide
  modified_base 24: mod_base = OTHER; note = 2'-O-methyl modified nucleotide
  modified_base 25: mod_base = OTHER; note = 2'-O-methyl modified nucleotide
  modified_base 26: mod_base = OTHER; note = 2'-O-methyl modified nucleotide
  modified_base 27: mod_base = OTHER; note = 2'-O-methyl modified nucleotide
  modified_base 28: mod_base = OTHER; note 2'-aminodiethoxymethanol-Adenine-N-Acetylgalactosamine
  modified_base 29: mod_base = OTHER; note 2'-aminodiethoxymethanol-Adenine-N-Acetylgalactosamine
  modified_base 30: mod_base = OTHER; note 2'-aminodiethoxymethanol-Adenine-N-Acetylgalactosamine
  modified_base 31: mod_base = OTHER; note = 2'-O-methyl modified nucleotide
  modified_base 32: mod_base = OTHER; note = 2'-O-methyl modified nucleotide
  modified_base 33: mod_base = OTHER; note = 2'-O-methyl modified nucleotide
  modified_base 34: mod_base = OTHER; note = 2'-O-methyl modified nucleotide
  modified_base 35: mod_base = OTHER; note = 2'-O-methyl modified nucleotide
  modified_base 36: mod_base = OTHER; note = 2'-O-methyl modified nucleotide

SEQ ID NO: 840 - RNA, 36 nt, synthetic construct; identical to SEQ ID NO: 770
  source 1..36: mol_type = other RNA
  modified_base 1: mod_base = OTHER; note = 2'-O-methyl modified nucleotide with phosphorothioate linkage
  modified_base 2: mod_base = OTHER; note = 2'-O-methyl modified nucleotide
  modified_base 3: mod_base = OTHER; note = 2'-fluoro modified nucleotide
  modified_base 4: mod_base = OTHER; note = 2'-O-methyl modified nucleotide
  modified_base 5: mod_base = OTHER; note = 2'-fluoro modified nucleotide
  modified_base 6: mod_base = OTHER; note = 2'-O-methyl modified nucleotide
  modified_base 7: mod_base = OTHER; note = 2'-O-methyl modified nucleotide
  modified_base 8: mod_base = OTHER; note = 2'-fluoro modified nucleotide
  modified_base 9: mod_base = OTHER; note = 2'-O-methyl modified nucleotide
  modified_base 10: mod_base = OTHER; note = 2'-fluoro modified nucleotide
  modified_base 11: mod_base = OTHER; note = 2'-O-methyl modified nucleotide
  modified_base 12: mod_base = OTHER; note = 2'-fluoro modified nucleotide
  modified_base 13: mod_base = OTHER; note = 2'-fluoro modified nucleotide
  modified_base 14: mod_base = OTHER; note = 2'-O-methyl modified nucleotide
  modified_base 15: mod_base = OTHER; note = 2'-fluoro modified nucleotide
  modified_base 16: mod_base = OTHER; note = 2'-O-methyl modified nucleotide
  modified_base 17: mod_base = OTHER; note = 2'-fluoro modified nucleotide
  modified_base 18: mod_base = OTHER; note = 2'-O-methyl modified nucleotide
  modified_base 19: mod_base = OTHER; note = 2'-O-methyl modified nucleotide
  modified_base 20: mod_base = OTHER; note = 2'-O-methyl modified nucleotide
  modified_base 21: mod_base = OTHER; note = 2'-O-methyl modified nucleotide
  modified_base 22: mod_base = OTHER; note = 2'-O-methyl modified nucleotide
  modified_base 23: mod_base = OTHER; note = 2'-O-methyl modified nucleotide
  modified_base 24: mod_base = OTHER; note = 2'-O-methyl modified nucleotide
  modified_base 25: mod_base = OTHER; note = 2'-O-methyl modified nucleotide
  modified_base 26: mod_base = OTHER; note = 2'-O-methyl modified nucleotide
  modified_base 27: mod_base = OTHER; note = 2'-O-methyl modified nucleotide
  modified_base 28: mod_base = OTHER; note 2'-aminodiethoxymethanol-Adenine-N-Acetylgalactosamine
  modified_base 29: mod_base = OTHER; note 2'-aminodiethoxymethanol-Adenine-N-Acetylgalactosamine
  modified_base 30: mod_base = OTHER; note 2'-aminodiethoxymethanol-Adenine-N-Acetylgalactosamine
  modified_base 31: mod_base = OTHER; note = 2'-O-methyl modified nucleotide
  modified_base 32: mod_base = OTHER; note = 2'-O-methyl modified nucleotide
  modified_base 33: mod_base = OTHER; note = 2'-O-methyl modified nucleotide
  modified_base 34: mod_base = OTHER; note = 2'-O-methyl modified nucleotide
  modified_base 35: mod_base = OTHER; note = 2'-O-methyl modified nucleotide
  modified_base 36: mod_base = OTHER; note = 2'-O-methyl modified nucleotide

SEQ ID NO: 841 - RNA, 36 nt, synthetic construct; identical to SEQ ID NO: 771
  source 1..36: mol_type = other RNA
  modified_base 1: mod_base = OTHER; note = 2'-O-methyl modified nucleotide with phosphorothioate linkage
  modified_base 2: mod_base = OTHER; note = 2'-O-methyl modified nucleotide
  modified_base 3: mod_base = OTHER; note = 2'-fluoro modified nucleotide
  modified_base 4: mod_base = OTHER; note = 2'-O-methyl modified nucleotide
  modified_base 5: mod_base = OTHER; note = 2'-fluoro modified nucleotide
  modified_base 6: mod_base = OTHER; note = 2'-O-methyl modified nucleotide
  modified_base 7: mod_base = OTHER; note = 2'-O-methyl modified nucleotide
  modified_base 8: mod_base = OTHER; note = 2'-fluoro modified nucleotide
  modified_base 9: mod_base = OTHER; note = 2'-O-methyl modified nucleotide
  modified_base 10: mod_base = OTHER; note = 2'-fluoro modified nucleotide
  modified_base 11: mod_base = OTHER; note = 2'-O-methyl modified nucleotide
  modified_base 12: mod_base = OTHER; note = 2'-fluoro modified nucleotide
  modified_base 13: mod_base = OTHER; note = 2'-fluoro modified nucleotide
  modified_base 14: mod_base = OTHER; note = 2'-O-methyl modified nucleotide
  modified_base 15: mod_base = OTHER; note = 2'-fluoro modified nucleotide
  modified_base 16: mod_base = OTHER; note = 2'-O-methyl modified nucleotide
  modified_base 17: mod_base = OTHER; note = 2'-fluoro modified nucleotide
  modified_base 18: mod_base = OTHER; note = 2'-O-methyl modified nucleotide
  modified_base 19: mod_base = OTHER; note = 2'-O-methyl modified nucleotide
  modified_base 20: mod_base = OTHER; note = 2'-O-methyl modified nucleotide
  modified_base 21: mod_base = OTHER; note = 2'-O-methyl modified nucleotide
  modified_base 22: mod_base = OTHER; note = 2'-O-methyl modified nucleotide
  modified_base 23: mod_base = OTHER; note = 2'-O-methyl modified nucleotide
  modified_base 24: mod_base = OTHER; note = 2'-O-methyl modified nucleotide
  modified_base 25: mod_base = OTHER; note = 2'-O-methyl modified nucleotide
  modified_base 26: mod_base = OTHER; note = 2'-O-methyl modified nucleotide
  modified_base 27: mod_base = OTHER; note = 2'-O-methyl modified nucleotide
  modified_base 28: mod_base = OTHER; note 2'-aminodiethoxymethanol-Adenine-N-Acetylgalactosamine
  modified_base 29: mod_base = OTHER; note 2'-aminodiethoxymethanol-Adenine-N-Acetylgalactosamine
  modified_base 30: mod_base = OTHER; note 2'-aminodiethoxymethanol-Adenine-N-Acetylgalactosamine
  modified_base 31: mod_base = OTHER; note = 2'-O-methyl modified nucleotide
  modified_base 32: mod_base = OTHER; note = 2'-O-methyl modified nucleotide
  modified_base 33: mod_base = OTHER; note = 2'-O-methyl modified nucleotide
  modified_base 34: mod_base = OTHER; note = 2'-O-methyl modified nucleotide
  modified_base 35: mod_base = OTHER; note = 2'-O-methyl modified nucleotide
  modified_base 36: mod_base = OTHER; note = 2'-O-methyl modified nucleotide

SEQ ID NO: 842 - RNA, 36 nt, synthetic construct; identical to SEQ ID NO: 772
  source 1..36: mol_type = other RNA
  modified_base 1: mod_base = OTHER; note = 2'-O-methyl modified nucleotide with phosphorothioate linkage
  modified_base 2: mod_base = OTHER; note = 2'-O-methyl modified nucleotide
  modified_base 3: mod_base = OTHER; note = 2'-fluoro modified nucleotide
  modified_base 4: mod_base = OTHER; note = 2'-O-methyl modified nucleotide
  modified_base 5: mod_base = OTHER; note = 2'-fluoro modified nucleotide
  modified_base 6: mod_base = OTHER; note = 2'-O-methyl modified nucleotide
  modified_base 7: mod_base = OTHER; note = 2'-O-methyl modified nucleotide
  modified_base 8: mod_base = OTHER; note = 2'-fluoro modified nucleotide
  modified_base 9: mod_base = OTHER; note = 2'-O-methyl modified nucleotide
  modified_base 10: mod_base = OTHER; note = 2'-fluoro modified nucleotide
  modified_base 11: mod_base = OTHER; note = 2'-O-methyl modified nucleotide
  modified_base 12: mod_base = OTHER; note = 2'-fluoro modified nucleotide
  modified_base 13: mod_base = OTHER; note = 2'-fluoro modified nucleotide
  modified_base 14: mod_base = OTHER; note = 2'-O-methyl modified nucleotide
  modified_base 15: mod_base = OTHER; note = 2'-fluoro modified nucleotide
  modified_base 16: mod_base = OTHER; note = 2'-O-methyl modified nucleotide
  modified_base 17: mod_base = OTHER; note = 2'-fluoro modified nucleotide
  modified_base 18: mod_base = OTHER; note = 2'-O-methyl modified nucleotide
  modified_base 19: mod_base = OTHER; note = 2'-O-methyl modified nucleotide
  modified_base 20: mod_base = OTHER; note = 2'-O-methyl modified nucleotide
  modified_base 21: mod_base = OTHER; note = 2'-O-methyl modified nucleotide
  modified_base 22: mod_base = OTHER; note = 2'-O-methyl modified nucleotide
  modified_base 23: mod_base = OTHER; note = 2'-O-methyl modified nucleotide
  modified_base 24: mod_base = OTHER; note = 2'-O-methyl modified nucleotide
  modified_base 25: mod_base = OTHER; note = 2'-O-methyl modified nucleotide
  modified_base 26: mod_base = OTHER; note = 2'-O-methyl modified nucleotide
  modified_base 27: mod_base = OTHER; note = 2'-O-methyl modified nucleotide
  modified_base 28: mod_base = OTHER; note 2'-aminodiethoxymethanol-Adenine-N-Acetylgalactosamine
  modified_base 29: mod_base = OTHER; note 2'-aminodiethoxymethanol-Adenine-N-Acetylgalactosamine
  modified_base 30: mod_base = OTHER; note 2'-aminodiethoxymethanol-Adenine-N-Acetylgalactosamine
  modified_base 31: mod_base = OTHER; note = 2'-O-methyl modified nucleotide
  modified_base 32: mod_base = OTHER; note = 2'-O-methyl modified nucleotide
  modified_base 33: mod_base = OTHER; note = 2'-O-methyl modified nucleotide
  modified_base 34: mod_base = OTHER; note = 2'-O-methyl modified nucleotide
  modified_base 35: mod_base = OTHER; note = 2'-O-methyl modified nucleotide
  modified_base 36: mod_base = OTHER; note = 2'-O-methyl modified nucleotide

SEQ ID NO: 843 - RNA, 36 nt, synthetic construct; identical to SEQ ID NO: 773
  source 1..36: mol_type = other RNA
  modified_base 1: mod_base = OTHER; note = 2'-O-methyl modified nucleotide with phosphorothioate linkage
  modified_base 2: mod_base = OTHER; note = 2'-O-methyl modified nucleotide
  modified_base 3: mod_base = OTHER; note = 2'-fluoro modified nucleotide
  modified_base 4: mod_base = OTHER; note = 2'-O-methyl modified nucleotide
  modified_base 5: mod_base = OTHER; note = 2'-fluoro modified nucleotide
  modified_base 6: mod_base = OTHER; note = 2'-O-methyl modified nucleotide
  modified_base 7: mod_base = OTHER; note = 2'-O-methyl modified nucleotide
  modified_base 8: mod_base = OTHER; note = 2'-fluoro modified nucleotide
  modified_base 9: mod_base = OTHER; note = 2'-O-methyl modified nucleotide
  modified_base 10: mod_base = OTHER; note = 2'-fluoro modified nucleotide
  modified_base 11: mod_base = OTHER; note = 2'-O-methyl modified nucleotide
  modified_base 12: mod_base = OTHER; note = 2'-fluoro modified nucleotide
  modified_base 13: mod_base = OTHER; note = 2'-fluoro modified nucleotide
  modified_base 14: mod_base = OTHER; note = 2'-O-methyl modified nucleotide
  modified_base 15: mod_base = OTHER; note = 2'-fluoro modified nucleotide
  modified_base 16: mod_base = OTHER; note = 2'-O-methyl modified nucleotide
  modified_base 17: mod_base = OTHER; note = 2'-fluoro modified nucleotide
  modified_base 18: mod_base = OTHER; note = 2'-O-methyl modified nucleotide
  modified_base 19: mod_base = OTHER; note = 2'-O-methyl modified nucleotide
  modified_base 20: mod_base = OTHER; note = 2'-O-methyl modified nucleotide
  modified_base 21: mod_base = OTHER; note = 2'-O-methyl modified nucleotide
  modified_base 22: mod_base = OTHER; note = 2'-O-methyl modified nucleotide
  modified_base 23: mod_base = OTHER; note = 2'-O-methyl modified nucleotide
  modified_base 24: mod_base = OTHER; note = 2'-O-methyl modified nucleotide
  modified_base 25: mod_base = OTHER; note = 2'-O-methyl modified nucleotide
  modified_base 26: mod_base = OTHER; note = 2'-O-methyl modified nucleotide
  modified_base 27: mod_base = OTHER; note = 2'-O-methyl modified nucleotide
  modified_base 28: mod_base = OTHER; note 2'-aminodiethoxymethanol-Adenine-N-Acetylgalactosamine
  modified_base 29: mod_base = OTHER; note 2'-aminodiethoxymethanol-Adenine-N-Acetylgalactosamine
  modified_base 30: mod_base = OTHER; note 2'-aminodiethoxymethanol-Adenine-N-Acetylgalactosamine
  modified_base 31: mod_base = OTHER; note = 2'-O-methyl modified nucleotide
  modified_base 32: mod_base = OTHER; note = 2'-O-methyl modified nucleotide
  modified_base 33: mod_base = OTHER; note = 2'-O-methyl modified nucleotide
  modified_base 34: mod_base = OTHER; note = 2'-O-methyl modified nucleotide
  modified_base 35: mod_base = OTHER; note = 2'-O-methyl modified nucleotide
  modified_base 36: mod_base = OTHER; note = 2'-O-methyl modified nucleotide

SEQ ID NO: 844 - RNA, 36 nt, synthetic construct; identical to SEQ ID NO: 774
  source 1..36: mol_type = other RNA
  modified_base 1: mod_base = OTHER; note = 2'-O-methyl modified nucleotide with phosphorothioate linkage
  modified_base 2: mod_base = OTHER; note = 2'-O-methyl modified nucleotide
  modified_base 3: mod_base = OTHER; note = 2'-fluoro modified nucleotide
  modified_base 4: mod_base = OTHER; note = 2'-O-methyl modified nucleotide
  modified_base 5: mod_base = OTHER; note = 2'-fluoro modified nucleotide
  modified_base 6: mod_base = OTHER; note = 2'-O-methyl modified nucleotide
  modified_base 7: mod_base = OTHER; note = 2'-O-methyl modified nucleotide
  modified_base 8: mod_base = OTHER; note = 2'-fluoro modified nucleotide
  modified_base 9: mod_base = OTHER; note = 2'-O-methyl modified nucleotide
  modified_base 10: mod_base = OTHER; note = 2'-fluoro modified nucleotide
  modified_base 11: mod_base = OTHER; note = 2'-O-methyl modified nucleotide
  modified_base 12: mod_base = OTHER; note = 2'-fluoro modified nucleotide
  modified_base 13: mod_base = OTHER; note = 2'-fluoro modified nucleotide
  modified_base 14: mod_base = OTHER; note = 2'-O-methyl modified nucleotide
  modified_base 15: mod_base = OTHER; note = 2'-fluoro modified nucleotide
  modified_base 16: mod_base = OTHER; note = 2'-O-methyl modified nucleotide
  modified_base 17: mod_base = OTHER; note = 2'-fluoro modified nucleotide
  modified_base 18: mod_base = OTHER; note = 2'-O-methyl modified nucleotide
  modified_base 19: mod_base = OTHER; note = 2'-O-methyl modified nucleotide
  modified_base 20: mod_base = OTHER; note = 2'-O-methyl modified nucleotide
  modified_base 21: mod_base = OTHER; note = 2'-O-methyl modified nucleotide
  modified_base 22: mod_base = OTHER; note = 2'-O-methyl modified nucleotide
  modified_base 23: mod_base = OTHER; note = 2'-O-methyl modified nucleotide
  modified_base 24: mod_base = OTHER; note = 2'-O-methyl modified nucleotide
  modified_base 25: mod_base = OTHER; note = 2'-O-methyl modified nucleotide
  modified_base 26: mod_base = OTHER; note = 2'-O-methyl modified nucleotide
  modified_base 27: mod_base = OTHER; note = 2'-O-methyl modified nucleotide
  modified_base 28: mod_base = OTHER; note 2'-aminodiethoxymethanol-Adenine-N-Acetylgalactosamine
  modified_base 29: mod_base = OTHER; note 2'-aminodiethoxymethanol-Adenine-N-Acetylgalactosamine
  modified_base 30: mod_base = OTHER; note 2'-aminodiethoxymethanol-Adenine-N-Acetylgalactosamine
  modified_base 31: mod_base = OTHER; note = 2'-O-methyl modified nucleotide
  modified_base 32: mod_base = OTHER; note = 2'-O-methyl modified nucleotide
  modified_base 33: mod_base = OTHER; note = 2'-O-methyl modified nucleotide
  modified_base 34: mod_base = OTHER; note = 2'-O-methyl modified nucleotide
  modified_base 35: mod_base = OTHER; note = 2'-O-methyl modified nucleotide
  modified_base 36: mod_base = OTHER; note = 2'-O-methyl modified nucleotide

SEQ ID NO: 845 - RNA, 36 nt, synthetic construct; identical to SEQ ID NO: 775
  source 1..36: mol_type = other RNA
  modified_base 1: mod_base = OTHER; note = 2'-O-methyl modified nucleotide with phosphorothioate linkage
  modified_base 2: mod_base = OTHER; note = 2'-O-methyl modified nucleotide
  modified_base 3: mod_base = OTHER; note = 2'-fluoro modified nucleotide
  modified_base 4: mod_base = OTHER; note = 2'-O-methyl modified nucleotide
  modified_base 5: mod_base = OTHER; note = 2'-fluoro modified nucleotide
  modified_base 6: mod_base = OTHER; note = 2'-O-methyl modified nucleotide
  modified_base 7: mod_base = OTHER; note = 2'-O-methyl modified nucleotide
  modified_base 8: mod_base = OTHER; note = 2'-fluoro modified nucleotide
  modified_base 9: mod_base = OTHER; note = 2'-O-methyl modified nucleotide
  modified_base 10: mod_base = OTHER; note = 2'-fluoro modified nucleotide
  modified_base 11: mod_base = OTHER; note = 2'-O-methyl modified nucleotide
  modified_base 12: mod_base = OTHER; note = 2'-fluoro modified nucleotide
  modified_base 13: mod_base = OTHER; note = 2'-fluoro modified nucleotide
  modified_base 14: mod_base = OTHER; note = 2'-O-methyl modified nucleotide
  modified_base 15: mod_base = OTHER; note = 2'-fluoro modified nucleotide
  modified_base 16: mod_base = OTHER; note = 2'-O-methyl modified nucleotide
  modified_base 17: mod_base = OTHER; note = 2'-fluoro modified nucleotide
  modified_base 18: mod_base = OTHER; note = 2'-O-methyl modified nucleotide
  modified_base 19: mod_base = OTHER; note = 2'-O-methyl modified nucleotide
  modified_base 20: mod_base = OTHER; note = 2'-O-methyl modified nucleotide
  modified_base 21: mod_base = OTHER; note = 2'-O-methyl modified nucleotide
  modified_base 22: mod_base = OTHER; note = 2'-O-methyl modified nucleotide
  modified_base 23: mod_base = OTHER; note = 2'-O-methyl modified nucleotide
  modified_base 24: mod_base = OTHER; note = 2'-O-methyl modified nucleotide
  modified_base 25: mod_base = OTHER; note = 2'-O-methyl modified nucleotide
  modified_base 26: mod_base = OTHER; note = 2'-O-methyl modified nucleotide
  modified_base 27: mod_base = OTHER; note = 2'-O-methyl modified nucleotide
  modified_base 28: mod_base = OTHER; note 2'-aminodiethoxymethanol-Adenine-N-Acetylgalactosamine
  modified_base 29: mod_base = OTHER; note 2'-aminodiethoxymethanol-Adenine-N-Acetylgalactosamine
  modified_base 30: mod_base = OTHER; note 2'-aminodiethoxymethanol-Adenine-N-Acetylgalactosamine
  modified_base 31: mod_base = OTHER; note = 2'-O-methyl modified nucleotide
  modified_base 32: mod_base = OTHER; note = 2'-O-methyl modified nucleotide
  modified_base 33: mod_base = OTHER; note = 2'-O-methyl modified nucleotide
  modified_base 34: mod_base = OTHER; note = 2'-O-methyl modified nucleotide
  modified_base 35: mod_base = OTHER; note = 2'-O-methyl modified nucleotide
  modified_base 36: mod_base = OTHER; note = 2'-O-methyl modified nucleotide

SEQ ID NO: 846 - RNA, 36 nt, synthetic construct; identical to SEQ ID NO: 776
  source 1..36: mol_type = other RNA
  modified_base 1: mod_base = OTHER; note = 2'-O-methyl modified nucleotide with phosphorothioate linkage
  modified_base 2: mod_base = OTHER; note = 2'-O-methyl modified nucleotide
  modified_base 3: mod_base = OTHER; note = 2'-fluoro modified nucleotide
  modified_base 4: mod_base = OTHER; note = 2'-O-methyl modified nucleotide
  modified_base 5: mod_base = OTHER; note = 2'-fluoro modified nucleotide
  modified_base 6: mod_base = OTHER; note = 2'-O-methyl modified nucleotide
  modified_base 7: mod_base = OTHER; note = 2'-O-methyl modified nucleotide
  modified_base 8: mod_base = OTHER; note = 2'-fluoro modified nucleotide
  modified_base 9: mod_base = OTHER; note = 2'-O-methyl modified nucleotide
  modified_base 10: mod_base = OTHER; note = 2'-fluoro modified nucleotide
  modified_base 11: mod_base = OTHER; note = 2'-O-methyl modified nucleotide
  modified_base 12: mod_base = OTHER; note = 2'-fluoro modified nucleotide
  modified_base 13: mod_base = OTHER; note = 2'-fluoro modified nucleotide
  modified_base 14: mod_base = OTHER; note = 2'-O-methyl modified nucleotide
  modified_base 15: mod_base = OTHER; note = 2'-fluoro modified nucleotide
  modified_base 16: mod_base = OTHER; note = 2'-O-methyl modified nucleotide
  modified_base 17: mod_base = OTHER; note = 2'-fluoro modified nucleotide
  modified_base 18: mod_base = OTHER; note = 2'-O-methyl modified nucleotide
  modified_base 19: mod_base = OTHER; note = 2'-O-methyl modified nucleotide
  modified_base 20: mod_base = OTHER; note = 2'-O-methyl modified nucleotide
  modified_base 21: mod_base = OTHER; note = 2'-O-methyl modified nucleotide
  modified_base 22: mod_base = OTHER; note = 2'-O-methyl modified nucleotide
  modified_base 23: mod_base = OTHER; note = 2'-O-methyl modified nucleotide
  modified_base 24: mod_base = OTHER; note = 2'-O-methyl modified nucleotide
  modified_base 25: mod_base = OTHER; note = 2'-O-methyl modified nucleotide
  modified_base 26: mod_base = OTHER; note = 2'-O-methyl modified nucleotide
  modified_base 27: mod_base = OTHER; note = 2'-O-methyl modified nucleotide
  modified_base 28: mod_base = OTHER; note 2'-aminodiethoxymethanol-Adenine-N-Acetylgalactosamine
  modified_base 29: mod_base = OTHER; note 2'-aminodiethoxymethanol-Adenine-N-Acetylgalactosamine
  modified_base 30: mod_base = OTHER; note 2'-aminodiethoxymethanol-Adenine-N-Acetylgalactosamine
  modified_base 31: mod_base = OTHER; note = 2'-O-methyl modified nucleotide
  modified_base 32: mod_base = OTHER; note = 2'-O-methyl modified nucleotide
  modified_base 33: mod_base = OTHER; note = 2'-O-methyl modified nucleotide
  modified_base 34: mod_base = OTHER; note = 2'-O-methyl modified nucleotide
  modified_base 35: mod_base = OTHER; note = 2'-O-methyl modified nucleotide
  modified_base 36: mod_base = OTHER; note = 2'-O-methyl modified nucleotide

SEQ ID NO: 847 - RNA, 36 nt, synthetic construct; identical to SEQ ID NO: 777
  source 1..36: mol_type = other RNA
  modified_base 1: mod_base = OTHER; note = 2'-O-methyl modified nucleotide with phosphorothioate linkage
  modified_base 2: mod_base = OTHER; note = 2'-O-methyl modified nucleotide
  modified_base 3: mod_base = OTHER; note = 2'-fluoro modified nucleotide
  modified_base 4: mod_base = OTHER; note = 2'-O-methyl modified nucleotide
  modified_base 5: mod_base = OTHER; note = 2'-fluoro modified nucleotide
  modified_base 6: mod_base = OTHER; note = 2'-O-methyl modified nucleotide
  modified_base 7: mod_base = OTHER; note = 2'-O-methyl modified nucleotide
  modified_base 8: mod_base = OTHER; note = 2'-fluoro modified nucleotide
  modified_base 9: mod_base = OTHER; note = 2'-O-methyl modified nucleotide
  modified_base 10: mod_base = OTHER; note = 2'-fluoro modified nucleotide
  modified_base 11: mod_base = OTHER; note = 2'-O-methyl modified nucleotide
  modified_base 12: mod_base = OTHER; note = 2'-fluoro modified nucleotide
  modified_base 13: mod_base = OTHER; note = 2'-fluoro modified nucleotide
  modified_base 14: mod_base = OTHER; note = 2'-O-methyl modified nucleotide
  modified_base 15: mod_base = OTHER; note = 2'-fluoro modified nucleotide
  modified_base 16: mod_base = OTHER; note = 2'-O-methyl modified nucleotide
  modified_base 17: mod_base = OTHER; note = 2'-fluoro modified nucleotide
  modified_base 18: mod_base = OTHER; note = 2'-O-methyl modified nucleotide
  modified_base 19: mod_base = OTHER; note = 2'-O-methyl modified nucleotide
  modified_base 20: mod_base = OTHER; note = 2'-O-methyl modified nucleotide
  modified_base 21: mod_base = OTHER; note = 2'-O-methyl modified nucleotide
  modified_base 22: mod_base = OTHER; note = 2'-O-methyl modified nucleotide
  modified_base 23: mod_base = OTHER; note = 2'-O-methyl modified nucleotide
  modified_base 24: mod_base = OTHER; note = 2'-O-methyl modified nucleotide
  modified_base 25: mod_base = OTHER; note = 2'-O-methyl modified nucleotide
  modified_base 26: mod_base = OTHER; note = 2'-O-methyl modified nucleotide
  modified_base 27: mod_base = OTHER; note = 2'-O-methyl modified nucleotide
  modified_base 28: mod_base = OTHER; note 2'-aminodiethoxymethanol-Adenine-N-Acetylgalactosamine
  modified_base 29: mod_base = OTHER; note 2'-aminodiethoxymethanol-Adenine-N-Acetylgalactosamine
  modified_base 30: mod_base = OTHER; note 2'-aminodiethoxymethanol-Adenine-N-Acetylgalactosamine
  modified_base 31: mod_base = OTHER; note = 2'-O-methyl modified nucleotide
  modified_base 32: mod_base = OTHER; note = 2'-O-methyl modified nucleotide
  modified_base 33: mod_base = OTHER; note = 2'-O-methyl modified nucleotide
  modified_base 34: mod_base = OTHER; note = 2'-O-methyl modified nucleotide
  modified_base 35: mod_base = OTHER; note = 2'-O-methyl modified nucleotide
  modified_base 36: mod_base = OTHER; note = 2'-O-methyl modified nucleotide

SEQ ID NO: 848 - RNA, 36 nt, synthetic construct; identical to SEQ ID NO: 778
  source 1..36: mol_type = other RNA
  modified_base 1: mod_base = OTHER; note = 2'-O-methyl modified nucleotide with phosphorothioate linkage
  modified_base 2: mod_base = OTHER; note = 2'-O-methyl modified nucleotide
  modified_base 3: mod_base = OTHER; note = 2'-fluoro modified nucleotide
  modified_base 4: mod_base = OTHER; note = 2'-O-methyl modified nucleotide
  modified_base 5: mod_base = OTHER; note = 2'-fluoro modified nucleotide
  modified_base 6: mod_base = OTHER; note = 2'-O-methyl modified nucleotide
  modified_base 7: mod_base = OTHER; note = 2'-O-methyl modified nucleotide
  modified_base 8: mod_base = OTHER; note = 2'-fluoro modified nucleotide
  modified_base 9: mod_base = OTHER; note = 2'-O-methyl modified nucleotide
  modified_base 10: mod_base = OTHER; note = 2'-fluoro modified nucleotide
  modified_base 11: mod_base = OTHER; note = 2'-O-methyl modified nucleotide
  modified_base 12: mod_base = OTHER; note = 2'-fluoro modified nucleotide
  modified_base 13: mod_base = OTHER; note = 2'-fluoro modified nucleotide
  modified_base 14: mod_base = OTHER; note = 2'-O-methyl modified nucleotide
  modified_base 15: mod_base = OTHER; note = 2'-fluoro modified nucleotide
  modified_base 16: mod_base = OTHER; note = 2'-O-methyl modified nucleotide
  modified_base 17: mod_base = OTHER; note = 2'-fluoro modified nucleotide
  modified_base 18: mod_base = OTHER; note = 2'-O-methyl modified nucleotide
  modified_base 19: mod_base = OTHER; note = 2'-O-methyl modified nucleotide
  modified_base 20: mod_base = OTHER; note = 2'-O-methyl modified nucleotide
  modified_base 21: mod_base = OTHER; note = 2'-O-methyl modified nucleotide
  modified_base 22: mod_base = OTHER; note = 2'-O-methyl modified nucleotide
  modified_base 23: mod_base = OTHER; note = 2'-O-methyl modified nucleotide
  modified_base 24: mod_base = OTHER; note = 2'-O-methyl modified nucleotide
  modified_base 25: mod_base = OTHER; note = 2'-O-methyl modified nucleotide
  modified_base 26: mod_base = OTHER; note = 2'-O-methyl modified nucleotide
  modified_base 27: mod_base = OTHER; note = 2'-O-methyl modified nucleotide
  modified_base 28: mod_base = OTHER; note 2'-aminodiethoxymethanol-Adenine-N-Acetylgalactosamine
  modified_base 29: mod_base = OTHER; note 2'-aminodiethoxymethanol-Adenine-N-Acetylgalactosamine
  modified_base 30: mod_base = OTHER; note 2'-aminodiethoxymethanol-Adenine-N-Acetylgalactosamine
  modified_base 31: mod_base = OTHER; note = 2'-O-methyl modified nucleotide
  modified_base 32: mod_base = OTHER; note = 2'-O-methyl modified nucleotide
  modified_base 33: mod_base = OTHER; note = 2'-O-methyl modified nucleotide
  modified_base 34: mod_base = OTHER; note = 2'-O-methyl modified nucleotide
  modified_base 35: mod_base = OTHER; note = 2'-O-methyl modified nucleotide
  modified_base 36: mod_base = OTHER; note = 2'-O-methyl modified nucleotide

SEQ ID NO: 849 - RNA, 36 nt, synthetic construct; identical to SEQ ID NO: 779
  source 1..36: mol_type = other RNA
  modified_base 1: mod_base = OTHER; note = 2'-O-methyl modified nucleotide with phosphorothioate linkage
  modified_base 2: mod_base = OTHER; note = 2'-O-methyl modified nucleotide
  modified_base 3: mod_base = OTHER; note = 2'-fluoro modified nucleotide
  modified_base 4: mod_base = OTHER; note = 2'-O-methyl modified nucleotide
  modified_base 5: mod_base = OTHER; note = 2'-fluoro modified nucleotide
  modified_base 6: mod_base = OTHER; note = 2'-O-methyl modified nucleotide
  modified_base 7: mod_base = OTHER; note = 2'-O-methyl modified nucleotide
  modified_base 8: mod_base = OTHER; note = 2'-fluoro modified nucleotide
  modified_base 9: mod_base = OTHER; note = 2'-O-methyl modified nucleotide
  modified_base 10: mod_base = OTHER; note = 2'-fluoro modified nucleotide
  modified_base 11: mod_base = OTHER; note = 2'-O-methyl modified nucleotide
  modified_base 12: mod_base = OTHER; note = 2'-fluoro modified nucleotide
  modified_base 13: mod_base = OTHER; note = 2'-fluoro modified nucleotide
  modified_base 14: mod_base = OTHER; note = 2'-O-methyl modified nucleotide
  modified_base 15: mod_base = OTHER; note = 2'-fluoro modified nucleotide
  modified_base 16: mod_base = OTHER; note = 2'-O-methyl modified nucleotide
  modified_base 17: mod_base = OTHER; note = 2'-fluoro modified nucleotide
  modified_base 18: mod_base = OTHER; note = 2'-O-methyl modified nucleotide
  modified_base 19: mod_base = OTHER; note = 2'-O-methyl modified nucleotide
  modified_base 20: mod_base = OTHER; note = 2'-O-methyl modified nucleotide
  modified_base 21: mod_base = OTHER; note = 2'-O-methyl modified nucleotide
  modified_base 22: mod_base = OTHER; note = 2'-O-methyl modified nucleotide
  modified_base 23: mod_base = OTHER; note = 2'-O-methyl modified nucleotide
  modified_base 24: mod_base = OTHER; note = 2'-O-methyl modified nucleotide
  modified_base 25: mod_base = OTHER; note = 2'-O-methyl modified nucleotide
  modified_base 26: mod_base = OTHER; note = 2'-O-methyl modified nucleotide
  modified_base 27: mod_base = OTHER; note = 2'-O-methyl modified nucleotide
  modified_base 28: mod_base = OTHER; note 2'-aminodiethoxymethanol-Adenine-N-Acetylgalactosamine
  modified_base 29: mod_base = OTHER; note 2'-aminodiethoxymethanol-Adenine-N-Acetylgalactosamine
  modified_base 30: mod_base = OTHER; note 2'-aminodiethoxymethanol-Adenine-N-Acetylgalactosamine
  modified_base 31: mod_base = OTHER; note = 2'-O-methyl modified nucleotide
  modified_base 32: mod_base = OTHER; note = 2'-O-methyl modified nucleotide
  modified_base 33: mod_base = OTHER; note = 2'-O-methyl modified nucleotide
  modified_base 34: mod_base = OTHER; note = 2'-O-methyl modified nucleotide
  modified_base 35: mod_base = OTHER; note = 2'-O-methyl modified nucleotide
  modified_base 36: mod_base = OTHER; note = 2'-O-methyl modified nucleotide

SEQ ID NO: 850 - RNA, 36 nt, synthetic construct; identical to SEQ ID NO: 780
  source 1..36: mol_type = other RNA
  modified_base 1: mod_base = OTHER; note = 2'-O-methyl modified nucleotide with phosphorothioate linkage
  modified_base 2: mod_base = OTHER; note = 2'-O-methyl modified nucleotide
  modified_base 3: mod_base = OTHER; note = 2'-fluoro modified nucleotide
  modified_base 4: mod_base = OTHER; note = 2'-O-methyl modified nucleotide
  modified_base 5: mod_base = OTHER; note = 2'-fluoro modified nucleotide
  modified_base 6: mod_base = OTHER; note = 2'-O-methyl modified nucleotide
  modified_base 7: mod_base = OTHER; note = 2'-O-methyl modified nucleotide
  modified_base 8: mod_base = OTHER; note = 2'-fluoro modified nucleotide
  modified_base 9: mod_base = OTHER; note = 2'-O-methyl modified nucleotide
  modified_base 10: mod_base = OTHER; note = 2'-fluoro modified nucleotide
  modified_base 11: mod_base = OTHER; note = 2'-O-methyl modified nucleotide
  modified_base 12: mod_base = OTHER; note = 2'-fluoro modified nucleotide
  modified_base 13: mod_base = OTHER; note = 2'-fluoro modified nucleotide
  modified_base 14: mod_base = OTHER; note = 2'-O-methyl modified nucleotide
  modified_base 15: mod_base = OTHER; note = 2'-fluoro modified nucleotide
  modified_base 16: mod_base = OTHER; note = 2'-O-methyl modified nucleotide
  modified_base 17: mod_base = OTHER; note = 2'-fluoro modified nucleotide
  modified_base 18: mod_base = OTHER; note = 2'-O-methyl modified nucleotide
  modified_base 19: mod_base = OTHER; note = 2'-O-methyl modified nucleotide
  modified_base 20: mod_base = OTHER; note = 2'-O-methyl modified nucleotide
  modified_base 21: mod_base = OTHER; note = 2'-O-methyl modified nucleotide
  modified_base 22: mod_base = OTHER; note = 2'-O-methyl modified nucleotide
  modified_base 23: mod_base = OTHER; note = 2'-O-methyl modified nucleotide
  modified_base 24: mod_base = OTHER; note = 2'-O-methyl modified nucleotide
  modified_base 25: mod_base = OTHER; note = 2'-O-methyl modified nucleotide
  modified_base 26: mod_base = OTHER; note = 2'-O-methyl modified nucleotide
  modified_base 27: mod_base = OTHER; note = 2'-O-methyl modified nucleotide
  modified_base 28: mod_base = OTHER; note 2'-aminodiethoxymethanol-Adenine-N-Acetylgalactosamine
  modified_base 29: mod_base = OTHER; note 2'-aminodiethoxymethanol-Adenine-N-Acetylgalactosamine
  modified_base 30: mod_base = OTHER; note 2'-aminodiethoxymethanol-Adenine-N-Acetylgalactosamine
  modified_base 31: mod_base = OTHER; note = 2'-O-methyl modified nucleotide
  modified_base 32: mod_base = OTHER; note = 2'-O-methyl modified nucleotide
  modified_base 33: mod_base = OTHER; note = 2'-O-methyl modified nucleotide
  modified_base 34: mod_base = OTHER; note = 2'-O-methyl modified nucleotide
  modified_base 35: mod_base = OTHER; note = 2'-O-methyl modified nucleotide
  modified_base 36: mod_base = OTHER; note = 2'-O-methyl modified nucleotide

SEQ ID NO: 851 - RNA, 36 nt, synthetic construct; identical to SEQ ID NO: 781
  source 1..36: mol_type = other RNA
  modified_base 1: mod_base = OTHER; note = 2'-O-methyl modified nucleotide with phosphorothioate linkage
  modified_base 2: mod_base = OTHER; note = 2'-O-methyl modified nucleotide
  modified_base 3: mod_base = OTHER; note = 2'-fluoro modified nucleotide
  modified_base 4: mod_base = OTHER; note = 2'-O-methyl modified nucleotide
  modified_base 5: mod_base = OTHER; note = 2'-fluoro modified nucleotide
  modified_base 6: mod_base = OTHER; note = 2'-O-methyl modified nucleotide
  modified_base 7: mod_base = OTHER; note = 2'-O-methyl modified nucleotide
  modified_base 8: mod_base = OTHER; note = 2'-fluoro modified nucleotide
  modified_base 9: mod_base = OTHER; note = 2'-O-methyl modified nucleotide
  modified_base 10: mod_base = OTHER; note = 2'-fluoro modified nucleotide
  modified_base 11: mod_base = OTHER; note = 2'-O-methyl modified nucleotide
  modified_base 12: mod_base = OTHER; note = 2'-fluoro modified nucleotide
  modified_base 13: mod_base = OTHER; note = 2'-fluoro modified nucleotide
  modified_base 14: mod_base = OTHER; note = 2'-O-methyl modified nucleotide
  modified_base 15: mod_base = OTHER; note = 2'-fluoro modified nucleotide
  modified_base 16: mod_base = OTHER; note = 2'-O-methyl modified nucleotide
  modified_base 17: mod_base = OTHER; note = 2'-fluoro modified nucleotide
  modified_base 18: mod_base = OTHER; note = 2'-O-methyl modified nucleotide
  modified_base 19: mod_base = OTHER; note = 2'-O-methyl modified nucleotide
  modified_base 20: mod_base = OTHER; note = 2'-O-methyl modified nucleotide
  modified_base 21: mod_base = OTHER; note = 2'-O-methyl modified nucleotide
  modified_base 22: mod_base = OTHER; note = 2'-O-methyl modified nucleotide
  modified_base 23: mod_base = OTHER; note = 2'-O-methyl modified nucleotide
  modified_base 24: mod_base = OTHER; note = 2'-O-methyl modified nucleotide
  modified_base 25: mod_base = OTHER; note = 2'-O-methyl modified nucleotide
  modified_base 26: mod_base = OTHER; note = 2'-O-methyl modified nucleotide
  modified_base 27: mod_base = OTHER; note = 2'-O-methyl modified nucleotide
  modified_base 28: mod_base = OTHER; note 2'-aminodiethoxymethanol-Adenine-N-Acetylgalactosamine
  modified_base 29: mod_base = OTHER; note 2'-aminodiethoxymethanol-Adenine-N-Acetylgalactosamine
  modified_base 30: mod_base = OTHER; note 2'-aminodiethoxymethanol-Adenine-N-Acetylgalactosamine
  modified_base 31: mod_base = OTHER; note = 2'-O-methyl modified nucleotide
  modified_base 32: mod_base = OTHER; note = 2'-O-methyl modified nucleotide
  modified_base 33: mod_base = OTHER; note = 2'-O-methyl modified nucleotide
  modified_base 34: mod_base = OTHER; note = 2'-O-methyl modified nucleotide
  modified_base 35: mod_base = OTHER; note = 2'-O-methyl modified nucleotide
  modified_base 36: mod_base = OTHER; note = 2'-O-methyl modified nucleotide

SEQ ID NO: 852 - RNA, 36 nt, synthetic construct; identical to SEQ ID NO: 782
  source 1..36: mol_type = other RNA
  modified_base 1: mod_base = OTHER; note = 2'-O-methyl modified nucleotide with phosphorothioate linkage
  modified_base 2: mod_base = OTHER; note = 2'-O-methyl modified nucleotide
  modified_base 3: mod_base = OTHER; note = 2'-fluoro modified nucleotide
  modified_base 4: mod_base = OTHER; note = 2'-O-methyl modified nucleotide
  modified_base 5: mod_base = OTHER; note = 2'-fluoro modified nucleotide
  modified_base 6: mod_base = OTHER; note = 2'-O-methyl modified nucleotide
  modified_base 7: mod_base = OTHER; note = 2'-O-methyl modified nucleotide
  modified_base 8: mod_base = OTHER; note = 2'-fluoro modified nucleotide
  modified_base 9: mod_base = OTHER; note = 2'-O-methyl modified nucleotide
  modified_base 10: mod_base = OTHER; note = 2'-fluoro modified nucleotide
  modified_base 11: mod_base = OTHER; note = 2'-O-methyl modified nucleotide
  modified_base 12: mod_base = OTHER; note = 2'-fluoro modified nucleotide
  modified_base 13: mod_base = OTHER; note = 2'-fluoro modified nucleotide
  modified_base 14: mod_base = OTHER; note = 2'-O-methyl modified nucleotide
  modified_base 15: mod_base = OTHER; note = 2'-fluoro modified nucleotide
  modified_base 16: mod_base = OTHER; note = 2'-O-methyl modified nucleotide
  modified_base 17: mod_base = OTHER; note = 2'-fluoro modified nucleotide
  modified_base 18: mod_base = OTHER; note = 2'-O-methyl modified nucleotide
  modified_base 19: mod_base = OTHER; note = 2'-O-methyl modified nucleotide
  modified_base 20: mod_base = OTHER; note = 2'-O-methyl modified nucleotide
  modified_base 21: mod_base = OTHER; note = 2'-O-methyl modified nucleotide
  modified_base 22: mod_base = OTHER; note = 2'-O-methyl modified nucleotide
  modified_base 23: mod_base = OTHER; note = 2'-O-methyl modified nucleotide
  modified_base 24: mod_base = OTHER; note = 2'-O-methyl modified nucleotide
  modified_base 25: mod_base = OTHER; note = 2'-O-methyl modified nucleotide
  modified_base 26: mod_base = OTHER; note = 2'-O-methyl modified nucleotide
  modified_base 27: mod_base = OTHER; note = 2'-O-methyl modified nucleotide
  modified_base 28: mod_base = OTHER; note 2'-aminodiethoxymethanol-Adenine-N-Acetylgalactosamine
  modified_base 29: mod_base = OTHER; note 2'-aminodiethoxymethanol-Adenine-N-Acetylgalactosamine
  modified_base 30: mod_base = OTHER; note 2'-aminodiethoxymethanol-Adenine-N-Acetylgalactosamine
  modified_base 31: mod_base = OTHER; note = 2'-O-methyl modified nucleotide
  modified_base 32: mod_base = OTHER; note = 2'-O-methyl modified nucleotide
  modified_base 33: mod_base = OTHER; note = 2'-O-methyl modified nucleotide
  modified_base 34: mod_base = OTHER; note = 2'-O-methyl modified nucleotide
  modified_base 35: mod_base = OTHER; note = 2'-O-methyl modified nucleotide
  modified_base 36: mod_base = OTHER; note = 2'-O-methyl modified nucleotide

SEQ ID NO: 853 - RNA, 36 nt, synthetic construct; identical to SEQ ID NO: 783
  source 1..36: mol_type = other RNA
  modified_base 1: mod_base = OTHER; note = 2'-O-methyl modified nucleotide with phosphorothioate linkage
  modified_base 2: mod_base = OTHER; note = 2'-O-methyl modified nucleotide
  modified_base 3: mod_base = OTHER; note = 2'-fluoro modified nucleotide
  modified_base 4: mod_base = OTHER; note = 2'-O-methyl modified nucleotide
  modified_base 5: mod_base = OTHER; note = 2'-fluoro modified nucleotide
  modified_base 6: mod_base = OTHER; note = 2'-O-methyl modified nucleotide
  modified_base 7: mod_base = OTHER; note = 2'-O-methyl modified nucleotide
  modified_base 8: mod_base = OTHER; note = 2'-fluoro modified nucleotide
  modified_base 9: mod_base = OTHER; note = 2'-O-methyl modified nucleotide
  modified_base 10: mod_base = OTHER; note = 2'-fluoro modified nucleotide
  modified_base 11: mod_base = OTHER; note = 2'-O-methyl modified nucleotide
  modified_base 12: mod_base = OTHER; note = 2'-fluoro modified nucleotide
  modified_base 13: mod_base = OTHER; note = 2'-fluoro modified nucleotide
  modified_base 14: mod_base = OTHER; note = 2'-O-methyl modified nucleotide
  modified_base 15: mod_base = OTHER; note = 2'-fluoro modified nucleotide
  modified_base 16: mod_base = OTHER; note = 2'-O-methyl modified nucleotide
  modified_base 17: mod_base = OTHER; note = 2'-fluoro modified nucleotide
  modified_base 18: mod_base = OTHER; note = 2'-O-methyl modified nucleotide
  modified_base 19: mod_base = OTHER; note = 2'-O-methyl modified nucleotide
  modified_base 20: mod_base = OTHER; note = 2'-O-methyl modified nucleotide
  modified_base 21: mod_base = OTHER; note = 2'-O-methyl modified nucleotide
  modified_base 22: mod_base = OTHER; note = 2'-O-methyl modified nucleotide
  modified_base 23: mod_base = OTHER; note = 2'-O-methyl modified nucleotide
  modified_base 24: mod_base = OTHER; note = 2'-O-methyl modified nucleotide
  modified_base 25: mod_base = OTHER; note = 2'-O-methyl modified nucleotide
  modified_base 26: mod_base = OTHER; note = 2'-O-methyl modified nucleotide
  modified_base 27: mod_base = OTHER; note = 2'-O-methyl modified nucleotide
  modified_base 28: mod_base = OTHER; note 2'-aminodiethoxymethanol-Adenine-N-Acetylgalactosamine
  modified_base 29: mod_base = OTHER; note 2'-aminodiethoxymethanol-Adenine-N-Acetylgalactosamine
  modified_base 30: mod_base = OTHER; note 2'-aminodiethoxymethanol-Adenine-N-Acetylgalactosamine
  modified_base 31: mod_base = OTHER; note = 2'-O-methyl modified nucleotide
  modified_base 32: mod_base = OTHER; note = 2'-O-methyl modified nucleotide
  modified_base 33: mod_base = OTHER; note = 2'-O-methyl modified nucleotide
  modified_base 34: mod_base = OTHER; note = 2'-O-methyl modified nucleotide
  modified_base 35: mod_base = OTHER; note = 2'-O-methyl modified nucleotide
  modified_base 36: mod_base = OTHER; note = 2'-O-methyl modified nucleotide

SEQ ID NO: 854 - RNA, 36 nt, synthetic construct; identical to SEQ ID NO: 784
  source 1..36: mol_type = other RNA
  modified_base 1: mod_base = OTHER; note = 2'-O-methyl modified nucleotide with phosphorothioate linkage
  modified_base 2: mod_base = OTHER; note = 2'-O-methyl modified nucleotide
  modified_base 3: mod_base = OTHER; note = 2'-fluoro modified nucleotide
  modified_base 4: mod_base = OTHER; note = 2'-O-methyl modified nucleotide
  modified_base 5: mod_base = OTHER; note = 2'-fluoro modified nucleotide
  modified_base 6: mod_base = OTHER; note = 2'-O-methyl modified nucleotide
  modified_base 7: mod_base = OTHER; note = 2'-O-methyl modified nucleotide
  modified_base 8: mod_base = OTHER; note = 2'-fluoro modified nucleotide
  modified_base 9: mod_base = OTHER; note = 2'-O-methyl modified nucleotide
  modified_base 10: mod_base = OTHER; note = 2'-fluoro modified nucleotide
  modified_base 11: mod_base = OTHER; note = 2'-O-methyl modified nucleotide
  modified_base 12: mod_base = OTHER; note = 2'-fluoro modified nucleotide
  modified_base 13: mod_base = OTHER; note = 2'-fluoro modified nucleotide
  modified_base 14: mod_base = OTHER; note = 2'-O-methyl modified nucleotide
  modified_base 15: mod_base = OTHER; note = 2'-fluoro modified nucleotide
  modified_base 16: mod_base = OTHER; note = 2'-O-methyl modified nucleotide
  modified_base 17: mod_base = OTHER; note = 2'-fluoro modified nucleotide
  modified_base 18: mod_base = OTHER; note = 2'-O-methyl modified nucleotide
  modified_base 19: mod_base = OTHER; note = 2'-O-methyl modified nucleotide
  modified_base 20: mod_base = OTHER; note = 2'-O-methyl modified nucleotide
  modified_base 21: mod_base = OTHER; note = 2'-O-methyl modified nucleotide
  modified_base 22: mod_base = OTHER; note = 2'-O-methyl modified nucleotide
  modified_base 23: mod_base = OTHER; note = 2'-O-methyl modified nucleotide
  modified_base 24: mod_base = OTHER; note = 2'-O-methyl modified nucleotide
  modified_base 25: mod_base = OTHER; note = 2'-O-methyl modified nucleotide
  modified_base 26: mod_base = OTHER; note = 2'-O-methyl modified nucleotide
  modified_base 27: mod_base = OTHER; note = 2'-O-methyl modified nucleotide
  modified_base 28: mod_base = OTHER; note 2'-aminodiethoxymethanol-Adenine-N-Acetylgalactosamine
  modified_base 29: mod_base = OTHER; note 2'-aminodiethoxymethanol-Adenine-N-Acetylgalactosamine
  modified_base 30: mod_base = OTHER; note 2'-aminodiethoxymethanol-Adenine-N-Acetylgalactosamine
  modified_base 31: mod_base = OTHER; note = 2'-O-methyl modified nucleotide
  modified_base 32: mod_base = OTHER; note = 2'-O-methyl modified nucleotide
  modified_base 33: mod_base = OTHER; note = 2'-O-methyl modified nucleotide
  modified_base 34: mod_base = OTHER; note = 2'-O-methyl modified nucleotide
  modified_base 35: mod_base = OTHER; note = 2'-O-methyl modified nucleotide
  modified_base 36: mod_base = OTHER; note = 2'-O-methyl modified nucleotide

SEQ ID NO: 855 - RNA, 36 nt, synthetic construct; identical to SEQ ID NO: 785
  source 1..36: mol_type = other RNA
  modified_base 1: mod_base = OTHER; note = 2'-O-methyl modified nucleotide with phosphorothioate linkage
  modified_base 2: mod_base = OTHER; note = 2'-O-methyl modified nucleotide
  modified_base 3: mod_base = OTHER; note = 2'-fluoro modified nucleotide
  modified_base 4: mod_base = OTHER; note = 2'-O-methyl modified nucleotide
  modified_base 5: mod_base = OTHER; note = 2'-fluoro modified nucleotide
  modified_base 6: mod_base = OTHER; note = 2'-O-methyl modified nucleotide
  modified_base 7: mod_base = OTHER; note = 2'-O-methyl modified nucleotide
  modified_base 8: mod_base = OTHER; note = 2'-fluoro modified nucleotide
  modified_base 9: mod_base = OTHER; note = 2'-O-methyl modified nucleotide
  modified_base 10: mod_base = OTHER; note = 2'-fluoro modified nucleotide
  modified_base 11: mod_base = OTHER; note = 2'-O-methyl modified nucleotide
  modified_base 12: mod_base = OTHER; note = 2'-fluoro modified nucleotide
  modified_base 13: mod_base = OTHER; note = 2'-fluoro modified nucleotide
  modified_base 14: mod_base = OTHER; note = 2'-O-methyl modified nucleotide
  modified_base 15: mod_base = OTHER; note = 2'-fluoro modified nucleotide
  modified_base 16: mod_base = OTHER; note = 2'-O-methyl modified nucleotide
  modified_base 17: mod_base = OTHER; note = 2'-fluoro modified nucleotide
  modified_base 18: mod_base = OTHER; note = 2'-O-methyl modified nucleotide
  modified_base 19: mod_base = OTHER; note = 2'-O-methyl modified nucleotide
  modified_base 20: mod_base = OTHER; note = 2'-O-methyl modified nucleotide
  modified_base 21: mod_base = OTHER; note = 2'-O-methyl modified nucleotide
  modified_base 22: mod_base = OTHER; note = 2'-O-methyl modified nucleotide
  modified_base 23: mod_base = OTHER; note = 2'-O-methyl modified nucleotide
  modified_base 24: mod_base = OTHER; note = 2'-O-methyl modified nucleotide
  modified_base 25: mod_base = OTHER; note = 2'-O-methyl modified nucleotide
  modified_base 26: mod_base = OTHER; note = 2'-O-methyl modified nucleotide
  modified_base 27: mod_base = OTHER; note = 2'-O-methyl modified nucleotide
  modified_base 28: mod_base = OTHER; note 2'-aminodiethoxymethanol-Adenine-N-Acetylgalactosamine
  modified_base 29: mod_base = OTHER; note 2'-aminodiethoxymethanol-Adenine-N-Acetylgalactosamine
  modified_base 30: mod_base = OTHER; note 2'-aminodiethoxymethanol-Adenine-N-Acetylgalactosamine
  modified_base 31: mod_base = OTHER; note = 2'-O-methyl modified nucleotide
  modified_base 32: mod_base = OTHER; note = 2'-O-methyl modified nucleotide
  modified_base 33: mod_base = OTHER; note = 2'-O-methyl modified nucleotide
  modified_base 34: mod_base = OTHER; note = 2'-O-methyl modified nucleotide
  modified_base 35: mod_base = OTHER; note = 2'-O-methyl modified nucleotide
  modified_base 36: mod_base = OTHER; note = 2'-O-methyl modified nucleotide

SEQ ID NO: 856 - RNA, 36 nt, synthetic construct; identical to SEQ ID NO: 786
  source 1..36: mol_type = other RNA
  modified_base 1: mod_base = OTHER; note = 2'-O-methyl modified nucleotide with phosphorothioate linkage
  modified_base 2: mod_base = OTHER; note = 2'-O-methyl modified nucleotide
  modified_base 3: mod_base = OTHER; note = 2'-O-methyl modified nucleotide
  modified_base 4: mod_base = OTHER; note = 2'-O-methyl modified nucleotide
  modified_base 5: mod_base = OTHER; note = 2'-O-methyl modified nucleotide
  modified_base 6: mod_base = OTHER; note = 2'-O-methyl modified nucleotide
  modified_base 7: mod_base = OTHER; note = 2'-O-methyl modified nucleotide
  modified_base 8: mod_base = OTHER; note = 2'-fluoro modified nucleotide
  modified_base 9: mod_base = OTHER; note = 2'-fluoro modified nucleotide
  modified_base 10: mod_base = OTHER; note = 2'-fluoro modified nucleotide
  modified_base 11: mod_base = OTHER; note = 2'-fluoro modified nucleotide
  modified_base 12: mod_base = OTHER; note = 2'-O-methyl modified nucleotide
  modified_base 13: mod_base = OTHER; note = 2'-O-methyl modified nucleotide
  modified_base 14: mod_base = OTHER; note = 2'-O-methyl modified nucleotide
  modified_base 15: mod_base = OTHER; note = 2'-O-methyl modified nucleotide
  modified_base 16: mod_base = OTHER; note = 2'-O-methyl modified nucleotide
  modified_base 17: mod_base = OTHER; note = 2'-O-methyl modified nucleotide
  modified_base 18: mod_base = OTHER; note = 2'-O-methyl modified nucleotide
  modified_base 19: mod_base = OTHER; note = 2'-O-methyl modified nucleotide
  modified_base 20: mod_base = OTHER; note = 2'-O-methyl modified nucleotide
  modified_base 21: mod_base = OTHER; note = 2'-O-methyl modified nucleotide
  modified_base 22: mod_base = OTHER; note = 2'-O-methyl modified nucleotide
  modified_base 23: mod_base = OTHER; note = 2'-O-methyl modified nucleotide
  modified_base 24: mod_base = OTHER; note = 2'-O-methyl modified nucleotide
  modified_base 25: mod_base = OTHER; note = 2'-O-methyl modified nucleotide
  modified_base 26: mod_base = OTHER; note = 2'-O-methyl modified nucleotide
  modified_base 27: mod_base = OTHER; note = 2'-O-methyl modified nucleotide
  modified_base 28: mod_base = OTHER; note 2'-aminodiethoxymethanol-Adenine-N-Acetylgalactosamine
  modified_base 29: mod_base = OTHER; note 2'-aminodiethoxymethanol-Adenine-N-Acetylgalactosamine
  modified_base 30: mod_base = OTHER; note 2'-aminodiethoxymethanol-Adenine-N-Acetylgalactosamine
  modified_base 31: mod_base = OTHER; note = 2'-O-methyl modified nucleotide
  modified_base 32: mod_base = OTHER; note = 2'-O-methyl modified nucleotide
  modified_base 33: mod_base = OTHER; note = 2'-O-methyl modified nucleotide
  modified_base 34: mod_base = OTHER; note = 2'-O-methyl modified nucleotide
  modified_base 35: mod_base = OTHER; note = 2'-O-methyl modified nucleotide
  modified_base 36: mod_base = OTHER; note = 2'-O-methyl modified nucleotide

SEQ ID NO: 857 - RNA, 36 nt, synthetic construct; identical to SEQ ID NO: 787
  source 1..36: mol_type = other RNA
  modified_base 1: mod_base = OTHER; note = 2'-O-methyl modified nucleotide with phosphorothioate linkage
  modified_base 2: mod_base = OTHER; note = 2'-O-methyl modified nucleotide
  modified_base 3: mod_base = OTHER; note = 2'-fluoro modified nucleotide
  modified_base 4: mod_base = OTHER; note = 2'-O-methyl modified nucleotide
  modified_base 5: mod_base = OTHER; note = 2'-fluoro modified nucleotide
  modified_base 6: mod_base = OTHER; note = 2'-O-methyl modified nucleotide
  modified_base 7: mod_base = OTHER; note = 2'-O-methyl modified nucleotide
  modified_base 8: mod_base = OTHER; note = 2'-fluoro modified nucleotide
  modified_base 9: mod_base = OTHER; note = 2'-O-methyl modified nucleotide
  modified_base 10: mod_base = OTHER; note = 2'-fluoro modified nucleotide
  modified_base 11: mod_base = OTHER; note = 2'-O-methyl modified nucleotide
  modified_base 12: mod_base = OTHER; note = 2'-fluoro modified nucleotide
  modified_base 13: mod_base = OTHER; note = 2'-fluoro modified nucleotide
  modified_base 14: mod_base = OTHER; note = 2'-O-methyl modified nucleotide
  modified_base 15: mod_base = OTHER; note = 2'-fluoro modified nucleotide
  modified_base 16: mod_base = OTHER; note = 2'-O-methyl modified nucleotide
  modified_base 17: mod_base = OTHER; note = 2'-fluoro modified nucleotide
  modified_base 18: mod_base = OTHER; note = 2'-O-methyl modified nucleotide
  modified_base 19: mod_base = OTHER; note = 2'-O-methyl modified nucleotide
  modified_base 20: mod_base = OTHER; note = 2'-O-methyl modified nucleotide
  modified_base 21: mod_base = OTHER; note = 2'-O-methyl modified nucleotide
  modified_base 22: mod_base = OTHER; note = 2'-O-methyl modified nucleotide
  modified_base 23: mod_base = OTHER; note = 2'-O-methyl modified nucleotide
  modified_base 24: mod_base = OTHER; note = 2'-O-methyl modified nucleotide
  modified_base 25: mod_base = OTHER; note = 2'-O-methyl modified nucleotide
  modified_base 26: mod_base = OTHER; note = 2'-O-methyl modified nucleotide
  modified_base 27: mod_base = OTHER; note = 2'-O-methyl modified nucleotide
  modified_base 28: mod_base = OTHER; note 2'-aminodiethoxymethanol-Adenine-N-Acetylgalactosamine
  modified_base 29: mod_base = OTHER; note 2'-aminodiethoxymethanol-Adenine-N-Acetylgalactosamine
  modified_base 30: mod_base = OTHER; note 2'-aminodiethoxymethanol-Adenine-N-Acetylgalactosamine
  modified_base 31: mod_base = OTHER; note = 2'-O-methyl modified nucleotide
  modified_base 32: mod_base = OTHER; note = 2'-O-methyl modified nucleotide
  modified_base 33: mod_base = OTHER; note = 2'-O-methyl modified nucleotide
  modified_base 34: mod_base = OTHER; note = 2'-O-methyl modified nucleotide
  modified_base 35: mod_base = OTHER; note = 2'-O-methyl modified nucleotide
  modified_base 36: mod_base = OTHER; note = 2'-O-methyl modified nucleotide

SEQ ID NO: 858 - RNA, 36 nt, synthetic construct; identical to SEQ ID NO: 788
  source 1..36: mol_type = other RNA
  modified_base 1: mod_base = OTHER; note = 2'-O-methyl modified nucleotide with phosphorothioate linkage
  modified_base 2: mod_base = OTHER; note = 2'-O-methyl modified nucleotide
  modified_base 3: mod_base = OTHER; note = 2'-fluoro modified nucleotide
  modified_base 4: mod_base = OTHER; note = 2'-O-methyl modified nucleotide
  modified_base 5: mod_base = OTHER; note = 2'-fluoro modified nucleotide
  modified_base 6: mod_base = OTHER; note = 2'-O-methyl modified nucleotide
  modified_base 7: mod_base = OTHER; note = 2'-O-methyl modified nucleotide
  modified_base 8: mod_base = OTHER; note = 2'-fluoro modified nucleotide
  modified_base 9: mod_base = OTHER; note = 2'-O-methyl modified nucleotide
  modified_base 10: mod_base = OTHER; note = 2'-fluoro modified nucleotide
  modified_base 11: mod_base = OTHER; note = 2'-O-methyl modified nucleotide
  modified_base 12: mod_base = OTHER; note = 2'-fluoro modified nucleotide
  modified_base 13: mod_base = OTHER; note = 2'-fluoro modified nucleotide
  modified_base 14: mod_base = OTHER; note = 2'-O-methyl modified nucleotide
  modified_base 15: mod_base = OTHER; note = 2'-fluoro modified nucleotide
  modified_base 16: mod_base = OTHER; note = 2'-O-methyl modified nucleotide
  modified_base 17: mod_base = OTHER; note = 2'-fluoro modified nucleotide
  modified_base 18: mod_base = OTHER; note = 2'-O-methyl modified nucleotide
  modified_base 19: mod_base = OTHER; note = 2'-O-methyl modified nucleotide
  modified_base 20: mod_base = OTHER; note = 2'-O-methyl modified nucleotide
  modified_base 21: mod_base = OTHER; note = 2'-O-methyl modified nucleotide
  modified_base 22: mod_base = OTHER; note = 2'-O-methyl modified nucleotide
  modified_base 23: mod_base = OTHER; note = 2'-O-methyl modified nucleotide
  modified_base 24: mod_base = OTHER; note = 2'-O-methyl modified nucleotide
  modified_base 25: mod_base = OTHER; note = 2'-O-methyl modified nucleotide
  modified_base 26: mod_base = OTHER; note = 2'-O-methyl modified nucleotide
  modified_base 27: mod_base = OTHER; note = 2'-O-methyl modified nucleotide
  modified_base 28: mod_base = OTHER; note 2'-aminodiethoxymethanol-Adenine-N-Acetylgalactosamine
  modified_base 29: mod_base = OTHER; note 2'-aminodiethoxymethanol-Adenine-N-Acetylgalactosamine
  modified_base 30: mod_base = OTHER; note 2'-aminodiethoxymethanol-Adenine-N-Acetylgalactosamine
  modified_base 31: mod_base = OTHER; note = 2'-O-methyl modified nucleotide
  modified_base 32: mod_base = OTHER; note = 2'-O-methyl modified nucleotide
  modified_base 33: mod_base = OTHER; note = 2'-O-methyl modified nucleotide
  modified_base 34: mod_base = OTHER; note = 2'-O-methyl modified nucleotide
  modified_base 35: mod_base = OTHER; note = 2'-O-methyl modified nucleotide
  modified_base 36: mod_base = OTHER; note = 2'-O-methyl modified nucleotide

SEQ ID NO: 859 - RNA, 36 nt, synthetic construct; identical to SEQ ID NO: 789
  source 1..36: mol_type = other RNA
  modified_base 1: mod_base = OTHER; note = 2'-O-methyl modified nucleotide with phosphorothioate linkage
  modified_base 2: mod_base = OTHER; note = 2'-O-methyl modified nucleotide
  modified_base 3: mod_base = OTHER; note = 2'-fluoro modified nucleotide
  modified_base 4: mod_base = OTHER; note = 2'-O-methyl modified nucleotide
  modified_base 5: mod_base = OTHER; note = 2'-fluoro modified nucleotide
  modified_base 6: mod_base = OTHER; note = 2'-O-methyl modified nucleotide
  modified_base 7: mod_base = OTHER; note = 2'-O-methyl modified nucleotide
  modified_base 8: mod_base = OTHER; note = 2'-fluoro modified nucleotide
  modified_base 9: mod_base = OTHER; note = 2'-O-methyl modified nucleotide
  modified_base 10: mod_base = OTHER; note = 2'-fluoro modified nucleotide
  modified_base 11: mod_base = OTHER; note = 2'-O-methyl modified nucleotide
  modified_base 12: mod_base = OTHER; note = 2'-fluoro modified nucleotide
  modified_base 13: mod_base = OTHER; note = 2'-fluoro modified nucleotide
  modified_base 14: mod_base = OTHER; note = 2'-O-methyl modified nucleotide
  modified_base 15: mod_base = OTHER; note = 2'-fluoro modified nucleotide
  modified_base 16: mod_base = OTHER; note = 2'-O-methyl modified nucleotide
  modified_base 17: mod_base = OTHER; note = 2'-fluoro modified nucleotide
  modified_base 18: mod_base = OTHER; note = 2'-O-methyl modified nucleotide
  modified_base 19: mod_base = OTHER; note = 2'-O-methyl modified nucleotide
  modified_base 20: mod_base = OTHER; note = 2'-O-methyl modified nucleotide
  modified_base 21: mod_base = OTHER; note = 2'-O-methyl modified nucleotide
  modified_base 22: mod_base = OTHER; note = 2'-O-methyl modified nucleotide
  modified_base 23: mod_base = OTHER; note = 2'-O-methyl modified nucleotide
  modified_base 24: mod_base = OTHER; note = 2'-O-methyl modified nucleotide
  modified_base 25: mod_base = OTHER; note = 2'-O-methyl modified nucleotide
  modified_base 26: mod_base = OTHER; note = 2'-O-methyl modified nucleotide
  modified_base 27: mod_base = OTHER; note = 2'-O-methyl modified nucleotide
  modified_base 28: mod_base = OTHER; note 2'-aminodiethoxymethanol-Adenine-N-Acetylgalactosamine
  modified_base 29: mod_base = OTHER; note 2'-aminodiethoxymethanol-Adenine-N-Acetylgalactosamine
  modified_base 30: mod_base = OTHER; note 2'-aminodiethoxymethanol-Adenine-N-Acetylgalactosamine
  modified_base 31: mod_base = OTHER; note = 2'-O-methyl modified nucleotide
  modified_base 32: mod_base = OTHER; note = 2'-O-methyl modified nucleotide
  modified_base 33: mod_base = OTHER; note = 2'-O-methyl modified nucleotide
  modified_base 34: mod_base = OTHER; note = 2'-O-methyl modified nucleotide
  modified_base 35: mod_base = OTHER; note = 2'-O-methyl modified nucleotide
  modified_base 36: mod_base = OTHER; note = 2'-O-methyl modified nucleotide

SEQ ID NO: 860 - RNA, 36 nt, synthetic construct; identical to SEQ ID NO: 790
  source 1..36: mol_type = other RNA
  modified_base 1: mod_base = OTHER; note = 2'-O-methyl modified nucleotide with phosphorothioate linkage
  modified_base 2: mod_base = OTHER; note = 2'-O-methyl modified nucleotide
  modified_base 3: mod_base = OTHER; note = 2'-fluoro modified nucleotide
  modified_base 4: mod_base = OTHER; note = 2'-O-methyl modified nucleotide
  modified_base 5: mod_base = OTHER; note = 2'-fluoro modified nucleotide
  modified_base 6: mod_base = OTHER; note = 2'-O-methyl modified nucleotide
  modified_base 7: mod_base = OTHER; note = 2'-O-methyl modified nucleotide
  modified_base 8: mod_base = OTHER; note = 2'-fluoro modified nucleotide
  modified_base 9: mod_base = OTHER; note = 2'-O-methyl modified nucleotide
  modified_base 10: mod_base = OTHER; note = 2'-fluoro modified nucleotide
  modified_base 11: mod_base = OTHER; note = 2'-O-methyl modified nucleotide
  modified_base 12: mod_base = OTHER; note = 2'-fluoro modified nucleotide
  modified_base 13: mod_base = OTHER; note = 2'-fluoro modified nucleotide
  modified_base 14: mod_base = OTHER; note = 2'-O-methyl modified nucleotide
  modified_base 15: mod_base = OTHER; note = 2'-fluoro modified nucleotide
  modified_base 16: mod_base = OTHER; note = 2'-O-methyl modified nucleotide
  modified_base 17: mod_base = OTHER; note = 2'-fluoro modified nucleotide
  modified_base 18: mod_base = OTHER; note = 2'-O-methyl modified nucleotide
  modified_base 19: mod_base = OTHER; note = 2'-O-methyl modified nucleotide
  modified_base 20: mod_base = OTHER; note = 2'-O-methyl modified nucleotide
  modified_base 21: mod_base = OTHER; note = 2'-O-methyl modified nucleotide
  modified_base 22: mod_base = OTHER; note = 2'-O-methyl modified nucleotide
  modified_base 23: mod_base = OTHER; note = 2'-O-methyl modified nucleotide
  modified_base 24: mod_base = OTHER; note = 2'-O-methyl modified nucleotide
  modified_base 25: mod_base = OTHER; note = 2'-O-methyl modified nucleotide
  modified_base 26: mod_base = OTHER; note = 2'-O-methyl modified nucleotide
  modified_base 27: mod_base = OTHER; note = 2'-O-methyl modified nucleotide
  modified_base 28: mod_base = OTHER; note 2'-aminodiethoxymethanol-Adenine-N-Acetylgalactosamine
  modified_base 29: mod_base = OTHER; note 2'-aminodiethoxymethanol-Adenine-N-Acetylgalactosamine
  modified_base 30: mod_base = OTHER; note 2'-aminodiethoxymethanol-Adenine-N-Acetylgalactosamine
  modified_base 31: mod_base = OTHER; note = 2'-O-methyl modified nucleotide
  modified_base 32: mod_base = OTHER; note = 2'-O-methyl modified nucleotide
  modified_base 33: mod_base = OTHER; note = 2'-O-methyl modified nucleotide
  modified_base 34: mod_base = OTHER; note = 2'-O-methyl modified nucleotide
  modified_base 35: mod_base = OTHER; note = 2'-O-methyl modified nucleotide
  modified_base 36: mod_base = OTHER; note = 2'-O-methyl modified nucleotide

SEQ ID NO: 861 - RNA, 36 nt, synthetic construct; identical to SEQ ID NO: 791
  source 1..36: mol_type = other RNA
  modified_base 1: mod_base = OTHER; note = 2'-O-methyl modified nucleotide with phosphorothioate linkage
  modified_base 2: mod_base = OTHER; note = 2'-O-methyl modified nucleotide
  modified_base 3: mod_base = OTHER; note = 2'-fluoro modified nucleotide
  modified_base 4: mod_base = OTHER; note = 2'-O-methyl modified nucleotide
  modified_base 5: mod_base = OTHER; note = 2'-fluoro modified nucleotide
  modified_base 6: mod_base = OTHER; note = 2'-O-methyl modified nucleotide
  modified_base 7: mod_base = OTHER; note = 2'-O-methyl modified nucleotide
  modified_base 8: mod_base = OTHER; note = 2'-fluoro modified nucleotide
  modified_base 9: mod_base = OTHER; note = 2'-O-methyl modified nucleotide
  modified_base 10: mod_base = OTHER; note = 2'-fluoro modified nucleotide
  modified_base 11: mod_base = OTHER; note = 2'-O-methyl modified nucleotide
  modified_base 12: mod_base = OTHER; note = 2'-fluoro modified nucleotide
  modified_base 13: mod_base = OTHER; note = 2'-fluoro modified nucleotide
  modified_base 14: mod_base = OTHER; note = 2'-O-methyl modified nucleotide
  modified_base 15: mod_base = OTHER; note = 2'-fluoro modified nucleotide
  modified_base 16: mod_base = OTHER; note = 2'-O-methyl modified nucleotide
  modified_base 17: mod_base = OTHER; note = 2'-fluoro modified nucleotide
  modified_base 18: mod_base = OTHER; note = 2'-O-methyl modified nucleotide
  modified_base 19: mod_base = OTHER; note = 2'-O-methyl modified nucleotide
  modified_base 20: mod_base = OTHER; note = 2'-O-methyl modified nucleotide
  modified_base 21: mod_base = OTHER; note = 2'-O-methyl modified nucleotide
  modified_base 22: mod_base = OTHER; note = 2'-O-methyl modified nucleotide
  modified_base 23: mod_base = OTHER; note = 2'-O-methyl modified nucleotide
  modified_base 24: mod_base = OTHER; note = 2'-O-methyl modified nucleotide
  modified_base 25: mod_base = OTHER; note = 2'-O-methyl modified nucleotide
  modified_base 26: mod_base = OTHER; note = 2'-O-methyl modified nucleotide
  modified_base 27: mod_base = OTHER; note = 2'-O-methyl modified nucleotide
  modified_base 28: mod_base = OTHER; note 2'-aminodiethoxymethanol-Adenine-N-Acetylgalactosamine
  modified_base 29: mod_base = OTHER; note 2'-aminodiethoxymethanol-Adenine-N-Acetylgalactosamine
  modified_base 30: mod_base = OTHER; note 2'-aminodiethoxymethanol-Adenine-N-Acetylgalactosamine
  modified_base 31: mod_base = OTHER; note = 2'-O-methyl modified nucleotide
  modified_base 32: mod_base = OTHER; note = 2'-O-methyl modified nucleotide
  modified_base 33: mod_base = OTHER; note = 2'-O-methyl modified nucleotide
  modified_base 34: mod_base = OTHER; note = 2'-O-methyl modified nucleotide
  modified_base 35: mod_base = OTHER; note = 2'-O-methyl modified nucleotide
  modified_base 36: mod_base = OTHER; note = 2'-O-methyl modified nucleotide

SEQ ID NO: 862 - RNA, 36 nt, synthetic construct; identical to SEQ ID NO: 792
  source 1..36: mol_type = other RNA
  modified_base 1: mod_base = OTHER; note = 2'-O-methyl modified nucleotide with phosphorothioate linkage
  modified_base 2: mod_base = OTHER; note = 2'-O-methyl modified nucleotide
  modified_base 3: mod_base = OTHER; note = 2'-fluoro modified nucleotide
  modified_base 4: mod_base = OTHER; note = 2'-O-methyl modified nucleotide
  modified_base 5: mod_base = OTHER; note = 2'-fluoro modified nucleotide
  modified_base 6: mod_base = OTHER; note = 2'-O-methyl modified nucleotide
  modified_base 7: mod_base = OTHER; note = 2'-O-methyl modified nucleotide
  modified_base 8: mod_base = OTHER; note = 2'-fluoro modified nucleotide
  modified_base 9: mod_base = OTHER; note = 2'-O-methyl modified nucleotide
  modified_base 10: mod_base = OTHER; note = 2'-fluoro modified nucleotide
  modified_base 11: mod_base = OTHER; note = 2'-O-methyl modified nucleotide
  modified_base 12: mod_base = OTHER; note = 2'-fluoro modified nucleotide
  modified_base 13: mod_base = OTHER; note = 2'-fluoro modified nucleotide
  modified_base 14: mod_base = OTHER; note = 2'-O-methyl modified nucleotide
  modified_base 15: mod_base = OTHER; note = 2'-fluoro modified nucleotide
  modified_base 16: mod_base = OTHER; note = 2'-O-methyl modified nucleotide
  modified_base 17: mod_base = OTHER; note = 2'-fluoro modified nucleotide
  modified_base 18: mod_base = OTHER; note = 2'-O-methyl modified nucleotide
  modified_base 19: mod_base = OTHER; note = 2'-O-methyl modified nucleotide
  modified_base 20: mod_base = OTHER; note = 2'-O-methyl modified nucleotide
  modified_base 21: mod_base = OTHER; note = 2'-O-methyl modified nucleotide
  modified_base 22: mod_base = OTHER; note = 2'-O-methyl modified nucleotide
  modified_base 23: mod_base = OTHER; note = 2'-O-methyl modified nucleotide
  modified_base 24: mod_base = OTHER; note = 2'-O-methyl modified nucleotide
  modified_base 25: mod_base = OTHER; note = 2'-O-methyl modified nucleotide
  modified_base 26: mod_base = OTHER; note = 2'-O-methyl modified nucleotide
  modified_base 27: mod_base = OTHER; note = 2'-O-methyl modified nucleotide
  modified_base 28: mod_base = OTHER; note 2'-aminodiethoxymethanol-Adenine-N-Acetylgalactosamine
  modified_base 29: mod_base = OTHER; note 2'-aminodiethoxymethanol-Adenine-N-Acetylgalactosamine
  modified_base 30: mod_base = OTHER; note 2'-aminodiethoxymethanol-Adenine-N-Acetylgalactosamine
  modified_base 31: mod_base = OTHER; note = 2'-O-methyl modified nucleotide
  modified_base 32: mod_base = OTHER; note = 2'-O-methyl modified nucleotide
  modified_base 33: mod_base = OTHER; note = 2'-O-methyl modified nucleotide
  modified_base 34: mod_base = OTHER; note = 2'-O-methyl modified nucleotide
  modified_base 35: mod_base = OTHER; note = 2'-O-methyl modified nucleotide
  modified_base 36: mod_base = OTHER; note = 2'-O-methyl modified nucleotide

SEQ ID NO: 863 - RNA, 36 nt, synthetic construct; identical to SEQ ID NO: 793
  source 1..36: mol_type = other RNA
  modified_base 1: mod_base = OTHER; note = 2'-O-methyl modified nucleotide with phosphorothioate linkage
  modified_base 2: mod_base = OTHER; note = 2'-O-methyl modified nucleotide
  modified_base 3: mod_base = OTHER; note = 2'-fluoro modified nucleotide
  modified_base 4: mod_base = OTHER; note = 2'-O-methyl modified nucleotide
  modified_base 5: mod_base = OTHER; note = 2'-fluoro modified nucleotide
  modified_base 6: mod_base = OTHER; note = 2'-O-methyl modified nucleotide
  modified_base 7: mod_base = OTHER; note = 2'-O-methyl modified nucleotide
  modified_base 8: mod_base = OTHER; note = 2'-fluoro modified nucleotide
  modified_base 9: mod_base = OTHER; note = 2'-O-methyl modified nucleotide
  modified_base 10: mod_base = OTHER; note = 2'-fluoro modified nucleotide
  modified_base 11: mod_base = OTHER; note = 2'-O-methyl modified nucleotide
  modified_base 12: mod_base = OTHER; note = 2'-fluoro modified nucleotide
  modified_base 13: mod_base = OTHER; note = 2'-fluoro modified nucleotide
  modified_base 14: mod_base = OTHER; note = 2'-O-methyl modified nucleotide
  modified_base 15: mod_base = OTHER; note = 2'-fluoro modified nucleotide
  modified_base 16: mod_base = OTHER; note = 2'-O-methyl modified nucleotide
  modified_base 17: mod_base = OTHER; note = 2'-fluoro modified nucleotide
  modified_base 18: mod_base = OTHER; note = 2'-O-methyl modified nucleotide
  modified_base 19: mod_base = OTHER; note = 2'-O-methyl modified nucleotide
  modified_base 20: mod_base = OTHER; note = 2'-O-methyl modified nucleotide
  modified_base 21: mod_base = OTHER; note = 2'-O-methyl modified nucleotide
  modified_base 22: mod_base = OTHER; note = 2'-O-methyl modified nucleotide
  modified_base 23: mod_base = OTHER; note = 2'-O-methyl modified nucleotide
  modified_base 24: mod_base = OTHER; note = 2'-O-methyl modified nucleotide
  modified_base 25: mod_base = OTHER; note = 2'-O-methyl modified nucleotide
  modified_base 26: mod_base = OTHER; note = 2'-O-methyl modified nucleotide
  modified_base 27: mod_base = OTHER; note = 2'-O-methyl modified nucleotide
  modified_base 28: mod_base = OTHER; note 2'-aminodiethoxymethanol-Adenine-N-Acetylgalactosamine
  modified_base 29: mod_base = OTHER; note 2'-aminodiethoxymethanol-Adenine-N-Acetylgalactosamine
  modified_base 30: mod_base = OTHER; note 2'-aminodiethoxymethanol-Adenine-N-Acetylgalactosamine
  modified_base 31: mod_base = OTHER; note = 2'-O-methyl modified nucleotide
  modified_base 32: mod_base = OTHER; note = 2'-O-methyl modified nucleotide
  modified_base 33: mod_base = OTHER; note = 2'-O-methyl modified nucleotide
  modified_base 34: mod_base = OTHER; note = 2'-O-methyl modified nucleotide
  modified_base 35: mod_base = OTHER; note = 2'-O-methyl modified nucleotide
  modified_base 36: mod_base = OTHER; note = 2'-O-methyl modified nucleotide

SEQ ID NO: 864 - RNA, 36 nt, synthetic construct; identical to SEQ ID NO: 794
  source 1..36: mol_type = other RNA
  modified_base 1: mod_base = OTHER; note = 2'-O-methyl modified nucleotide with phosphorothioate linkage
  modified_base 2: mod_base = OTHER; note = 2'-O-methyl modified nucleotide
  modified_base 3: mod_base = OTHER; note = 2'-fluoro modified nucleotide
  modified_base 4: mod_base = OTHER; note = 2'-O-methyl modified nucleotide
  modified_base 5: mod_base = OTHER; note = 2'-fluoro modified nucleotide
  modified_base 6: mod_base = OTHER; note = 2'-O-methyl modified nucleotide
  modified_base 7: mod_base = OTHER; note = 2'-O-methyl modified nucleotide
  modified_base 8: mod_base = OTHER; note = 2'-fluoro modified nucleotide
  modified_base 9: mod_base = OTHER; note = 2'-O-methyl modified nucleotide
  modified_base 10: mod_base = OTHER; note = 2'-fluoro modified nucleotide
  modified_base 11: mod_base = OTHER; note = 2'-O-methyl modified nucleotide
  modified_base 12: mod_base = OTHER; note = 2'-fluoro modified nucleotide
  modified_base 13: mod_base = OTHER; note = 2'-fluoro modified nucleotide
  modified_base 14: mod_base = OTHER; note = 2'-O-methyl modified nucleotide
  modified_base 15: mod_base = OTHER; note = 2'-fluoro modified nucleotide
  modified_base 16: mod_base = OTHER; note = 2'-O-methyl modified nucleotide
  modified_base 17: mod_base = OTHER; note = 2'-fluoro modified nucleotide
  modified_base 18: mod_base = OTHER; note = 2'-O-methyl modified nucleotide
  modified_base 19: mod_base = OTHER; note = 2'-O-methyl modified nucleotide
  modified_base 20: mod_base = OTHER; note = 2'-O-methyl modified nucleotide
  modified_base 21: mod_base = OTHER; note = 2'-O-methyl modified nucleotide
  modified_base 22: mod_base = OTHER; note = 2'-O-methyl modified nucleotide
  modified_base 23: mod_base = OTHER; note = 2'-O-methyl modified nucleotide
  modified_base 24: mod_base = OTHER; note = 2'-O-methyl modified nucleotide
  modified_base 25: mod_base = OTHER; note = 2'-O-methyl modified nucleotide
  modified_base 26: mod_base = OTHER; note = 2'-O-methyl modified nucleotide
  modified_base 27: mod_base = OTHER; note = 2'-O-methyl modified nucleotide
  modified_base 28: mod_base = OTHER; note 2'-aminodiethoxymethanol-Adenine-N-Acetylgalactosamine
  modified_base 29: mod_base = OTHER; note 2'-aminodiethoxymethanol-Adenine-N-Acetylgalactosamine
  modified_base 30: mod_base = OTHER; note 2'-aminodiethoxymethanol-Adenine-N-Acetylgalactosamine
  modified_base 31: mod_base = OTHER; note = 2'-O-methyl modified nucleotide
  modified_base 32: mod_base = OTHER; note = 2'-O-methyl modified nucleotide
  modified_base 33: mod_base = OTHER; note = 2'-O-methyl modified nucleotide
  modified_base 34: mod_base = OTHER; note = 2'-O-methyl modified nucleotide
  modified_base 35: mod_base = OTHER; note = 2'-O-methyl modified nucleotide
  modified_base 36: mod_base = OTHER; note = 2'-O-methyl modified nucleotide

SEQ ID NO: 865 - RNA, 36 nt, synthetic construct; identical to SEQ ID NO: 795
  source 1..36: mol_type = other RNA
  modified_base 1: mod_base = OTHER; note = 2'-O-methyl modified nucleotide with phosphorothioate linkage
  modified_base 2: mod_base = OTHER; note = 2'-O-methyl modified nucleotide
  modified_base 3: mod_base = OTHER; note = 2'-fluoro modified nucleotide
  modified_base 4: mod_base = OTHER; note = 2'-O-methyl modified nucleotide
  modified_base 5: mod_base = OTHER; note = 2'-fluoro modified nucleotide
  modified_base 6: mod_base = OTHER; note = 2'-O-methyl modified nucleotide
  modified_base 7: mod_base = OTHER; note = 2'-O-methyl modified nucleotide
  modified_base 8: mod_base = OTHER; note = 2'-fluoro modified nucleotide
  modified_base 9: mod_base = OTHER; note = 2'-O-methyl modified nucleotide
  modified_base 10: mod_base = OTHER; note = 2'-fluoro modified nucleotide
  modified_base 11: mod_base = OTHER; note = 2'-O-methyl modified nucleotide
  modified_base 12: mod_base = OTHER; note = 2'-fluoro modified nucleotide
  modified_base 13: mod_base = OTHER; note = 2'-fluoro modified nucleotide
  modified_base 14: mod_base = OTHER; note = 2'-O-methyl modified nucleotide
  modified_base 15: mod_base = OTHER; note = 2'-fluoro modified nucleotide
  modified_base 16: mod_base = OTHER; note = 2'-O-methyl modified nucleotide
  modified_base 17: mod_base = OTHER; note = 2'-fluoro modified nucleotide
  modified_base 18: mod_base = OTHER; note = 2'-O-methyl modified nucleotide
  modified_base 19: mod_base = OTHER; note = 2'-O-methyl modified nucleotide
  modified_base 20: mod_base = OTHER; note = 2'-O-methyl modified nucleotide
  modified_base 21: mod_base = OTHER; note = 2'-O-methyl modified nucleotide
  modified_base 22: mod_base = OTHER; note = 2'-O-methyl modified nucleotide
  modified_base 23: mod_base = OTHER; note = 2'-O-methyl modified nucleotide
  modified_base 24: mod_base = OTHER; note = 2'-O-methyl modified nucleotide
  modified_base 25: mod_base = OTHER; note = 2'-O-methyl modified nucleotide
  modified_base 26: mod_base = OTHER; note = 2'-O-methyl modified nucleotide
  modified_base 27: mod_base = OTHER; note = 2'-O-methyl modified nucleotide
  modified_base 28: mod_base = OTHER; note 2'-aminodiethoxymethanol-Adenine-N-Acetylgalactosamine
  modified_base 29: mod_base = OTHER; note 2'-aminodiethoxymethanol-Adenine-N-Acetylgalactosamine
  modified_base 30: mod_base = OTHER; note 2'-aminodiethoxymethanol-Adenine-N-Acetylgalactosamine
  modified_base 31: mod_base = OTHER; note = 2'-O-methyl modified nucleotide
  modified_base 32: mod_base = OTHER; note = 2'-O-methyl modified nucleotide
  modified_base 33: mod_base = OTHER; note = 2'-O-methyl modified nucleotide
  modified_base 34: mod_base = OTHER; note = 2'-O-methyl modified nucleotide
  modified_base 35: mod_base = OTHER; note = 2'-O-methyl modified nucleotide
  modified_base 36: mod_base = OTHER; note = 2'-O-methyl modified nucleotide

SEQ ID NO: 866 - RNA, 36 nt, synthetic construct; identical to SEQ ID NO: 796
  source 1..36: mol_type = other RNA
  modified_base 1: mod_base = OTHER; note = 2'-O-methyl modified nucleotide with phosphorothioate linkage
  modified_base 2: mod_base = OTHER; note = 2'-O-methyl modified nucleotide
  modified_base 3: mod_base = OTHER; note = 2'-fluoro modified nucleotide
  modified_base 4: mod_base = OTHER; note = 2'-O-methyl modified nucleotide
  modified_base 5: mod_base = OTHER; note = 2'-fluoro modified nucleotide
  modified_base 6: mod_base = OTHER; note = 2'-O-methyl modified nucleotide
  modified_base 7: mod_base = OTHER; note = 2'-O-methyl modified nucleotide
  modified_base 8: mod_base = OTHER; note = 2'-fluoro modified nucleotide
  modified_base 9: mod_base = OTHER; note = 2'-O-methyl modified nucleotide
  modified_base 10: mod_base = OTHER; note = 2'-fluoro modified nucleotide
  modified_base 11: mod_base = OTHER; note = 2'-O-methyl modified nucleotide
  modified_base 12: mod_base = OTHER; note = 2'-fluoro modified nucleotide
  modified_base 13: mod_base = OTHER; note = 2'-fluoro modified nucleotide
  modified_base 14: mod_base = OTHER; note = 2'-O-methyl modified nucleotide
  modified_base 15: mod_base = OTHER; note = 2'-fluoro modified nucleotide
  modified_base 16: mod_base = OTHER; note = 2'-O-methyl modified nucleotide
  modified_base 17: mod_base = OTHER; note = 2'-fluoro modified nucleotide
  modified_base 18: mod_base = OTHER; note = 2'-O-methyl modified nucleotide
  modified_base 19: mod_base = OTHER; note = 2'-O-methyl modified nucleotide
  modified_base 20: mod_base = OTHER; note = 2'-O-methyl modified nucleotide
  modified_base 21: mod_base = OTHER; note = 2'-O-methyl modified nucleotide
  modified_base 22: mod_base = OTHER; note = 2'-O-methyl modified nucleotide
  modified_base 23: mod_base = OTHER; note = 2'-O-methyl modified nucleotide
  modified_base 24: mod_base = OTHER; note = 2'-O-methyl modified nucleotide
  modified_base 25: mod_base = OTHER; note = 2'-O-methyl modified nucleotide
  modified_base 26: mod_base = OTHER; note = 2'-O-methyl modified nucleotide
  modified_base 27: mod_base = OTHER; note = 2'-O-methyl modified nucleotide
  modified_base 28: mod_base = OTHER; note 2'-aminodiethoxymethanol-Adenine-N-Acetylgalactosamine
  modified_base 29: mod_base = OTHER; note 2'-aminodiethoxymethanol-Adenine-N-Acetylgalactosamine
  modified_base 30: mod_base = OTHER; note 2'-aminodiethoxymethanol-Adenine-N-Acetylgalactosamine
  modified_base 31: mod_base = OTHER; note = 2'-O-methyl modified nucleotide
  modified_base 32: mod_base = OTHER; note = 2'-O-methyl modified nucleotide
  modified_base 33: mod_base = OTHER; note = 2'-O-methyl modified nucleotide
  modified_base 34: mod_base = OTHER; note = 2'-O-methyl modified nucleotide
  modified_base 35: mod_base = OTHER; note = 2'-O-methyl modified nucleotide
  modified_base 36: mod_base = OTHER; note = 2'-O-methyl modified nucleotide

SEQ ID NO: 867 - RNA, 36 nt, synthetic construct; identical to SEQ ID NO: 797
  source 1..36: mol_type = other RNA
  modified_base 1: mod_base = OTHER; note = 2'-O-methyl modified nucleotide with phosphorothioate linkage
  modified_base 2: mod_base = OTHER; note = 2'-O-methyl modified nucleotide
  modified_base 3: mod_base = OTHER; note = 2'-fluoro modified nucleotide
  modified_base 4: mod_base = OTHER; note = 2'-O-methyl modified nucleotide
  modified_base 5: mod_base = OTHER; note = 2'-fluoro modified nucleotide
  modified_base 6: mod_base = OTHER; note = 2'-O-methyl modified nucleotide
  modified_base 7: mod_base = OTHER; note = 2'-O-methyl modified nucleotide
  modified_base 8: mod_base = OTHER; note = 2'-fluoro modified nucleotide
  modified_base 9: mod_base = OTHER; note = 2'-O-methyl modified nucleotide
  modified_base 10: mod_base = OTHER; note = 2'-fluoro modified nucleotide
  modified_base 11: mod_base = OTHER; note = 2'-O-methyl modified nucleotide
  modified_base 12: mod_base = OTHER; note = 2'-fluoro modified nucleotide
  modified_base 13: mod_base = OTHER; note = 2'-fluoro modified nucleotide
  modified_base 14: mod_base = OTHER; note = 2'-O-methyl modified nucleotide
  modified_base 15: mod_base = OTHER; note = 2'-fluoro modified nucleotide
  modified_base 16: mod_base = OTHER; note = 2'-O-methyl modified nucleotide
  modified_base 17: mod_base = OTHER; note = 2'-fluoro modified nucleotide
  modified_base 18: mod_base = OTHER; note = 2'-O-methyl modified nucleotide
  modified_base 19: mod_base = OTHER; note = 2'-O-methyl modified nucleotide
  modified_base 20: mod_base = OTHER; note = 2'-O-methyl modified nucleotide
  modified_base 21: mod_base = OTHER; note = 2'-O-methyl modified nucleotide
  modified_base 22: mod_base = OTHER; note = 2'-O-methyl modified nucleotide
  modified_base 23: mod_base = OTHER; note = 2'-O-methyl modified nucleotide
  modified_base 24: mod_base = OTHER; note = 2'-O-methyl modified nucleotide
  modified_base 25: mod_base = OTHER; note = 2'-O-methyl modified nucleotide
  modified_base 26: mod_base = OTHER; note = 2'-O-methyl modified nucleotide
  modified_base 27: mod_base = OTHER; note = 2'-O-methyl modified nucleotide
  modified_base 28: mod_base = OTHER; note 2'-aminodiethoxymethanol-Adenine-N-Acetylgalactosamine
  modified_base 29: mod_base = OTHER; note 2'-aminodiethoxymethanol-Adenine-N-Acetylgalactosamine
  modified_base 30: mod_base = OTHER; note 2'-aminodiethoxymethanol-Adenine-N-Acetylgalactosamine
  modified_base 31: mod_base = OTHER; note = 2'-O-methyl modified nucleotide
  modified_base 32: mod_base = OTHER; note = 2'-O-methyl modified nucleotide
  modified_base 33: mod_base = OTHER; note = 2'-O-methyl modified nucleotide
  modified_base 34: mod_base = OTHER; note = 2'-O-methyl modified nucleotide
  modified_base 35: mod_base = OTHER; note = 2'-O-methyl modified nucleotide
  modified_base 36: mod_base = OTHER; note = 2'-O-methyl modified nucleotide

SEQ ID NO: 868 - RNA, 36 nt, synthetic construct; identical to SEQ ID NO: 798
  source 1..36: mol_type = other RNA
  modified_base 1: mod_base = OTHER; note = 2'-O-methyl modified nucleotide with phosphorothioate linkage
  modified_base 2: mod_base = OTHER; note = 2'-O-methyl modified nucleotide
  modified_base 3: mod_base = OTHER; note = 2'-fluoro modified nucleotide
  modified_base 4: mod_base = OTHER; note = 2'-O-methyl modified nucleotide
  modified_base 5: mod_base = OTHER; note = 2'-fluoro modified nucleotide
  modified_base 6: mod_base = OTHER; note = 2'-O-methyl modified nucleotide
  modified_base 7: mod_base = OTHER; note = 2'-O-methyl modified nucleotide
  modified_base 8: mod_base = OTHER; note = 2'-fluoro modified nucleotide
  modified_base 9: mod_base = OTHER; note = 2'-O-methyl modified nucleotide
  modified_base 10: mod_base = OTHER; note = 2'-fluoro modified nucleotide
  modified_base 11: mod_base = OTHER; note = 2'-O-methyl modified nucleotide
  modified_base 12: mod_base = OTHER; note = 2'-fluoro modified nucleotide
  modified_base 13: mod_base = OTHER; note = 2'-fluoro modified nucleotide
  modified_base 14: mod_base = OTHER; note = 2'-O-methyl modified nucleotide
  modified_base 15: mod_base = OTHER; note = 2'-fluoro modified nucleotide
  modified_base 16: mod_base = OTHER; note = 2'-O-methyl modified nucleotide
  modified_base 17: mod_base = OTHER; note = 2'-fluoro modified nucleotide
  modified_base 18: mod_base = OTHER; note = 2'-O-methyl modified nucleotide
  modified_base 19: mod_base = OTHER; note = 2'-O-methyl modified nucleotide
  modified_base 20: mod_base = OTHER; note = 2'-O-methyl modified nucleotide
  modified_base 21: mod_base = OTHER; note = 2'-O-methyl modified nucleotide
  modified_base 22: mod_base = OTHER; note = 2'-O-methyl modified nucleotide
  modified_base 23: mod_base = OTHER; note = 2'-O-methyl modified nucleotide
  modified_base 24: mod_base = OTHER; note = 2'-O-methyl modified nucleotide
  modified_base 25: mod_base = OTHER; note = 2'-O-methyl modified nucleotide
  modified_base 26: mod_base = OTHER; note = 2'-O-methyl modified nucleotide
  modified_base 27: mod_base = OTHER; note = 2'-O-methyl modified nucleotide
  modified_base 28: mod_base = OTHER; note 2'-aminodiethoxymethanol-Adenine-N-Acetylgalactosamine
  modified_base 29: mod_base = OTHER; note 2'-aminodiethoxymethanol-Adenine-N-Acetylgalactosamine
  modified_base 30: mod_base = OTHER; note 2'-aminodiethoxymethanol-Adenine-N-Acetylgalactosamine
  modified_base 31: mod_base = OTHER; note = 2'-O-methyl modified nucleotide
  modified_base 32: mod_base = OTHER; note = 2'-O-methyl modified nucleotide
  modified_base 33: mod_base = OTHER; note = 2'-O-methyl modified nucleotide
  modified_base 34: mod_base = OTHER; note = 2'-O-methyl modified nucleotide
  modified_base 35: mod_base = OTHER; note = 2'-O-methyl modified nucleotide
  modified_base 36: mod_base = OTHER; note = 2'-O-methyl modified nucleotide

SEQ ID NO: 869 - RNA, 36 nt, synthetic construct; identical to SEQ ID NO: 799
  source 1..36: mol_type = other RNA
  modified_base 1: mod_base = OTHER; note = 2'-O-methyl modified nucleotide with phosphorothioate linkage
  modified_base 2: mod_base = OTHER; note = 2'-O-methyl modified nucleotide
  modified_base 3: mod_base = OTHER; note = 2'-fluoro modified nucleotide
  modified_base 4: mod_base = OTHER; note = 2'-O-methyl modified nucleotide
  modified_base 5: mod_base = OTHER; note = 2'-fluoro modified nucleotide
  modified_base 6: mod_base = OTHER; note = 2'-O-methyl modified nucleotide
  modified_base 7: mod_base = OTHER; note = 2'-O-methyl modified nucleotide
  modified_base 8: mod_base = OTHER; note = 2'-fluoro modified nucleotide
  modified_base 9: mod_base = OTHER; note = 2'-O-methyl modified nucleotide
  modified_base 10: mod_base = OTHER; note = 2'-fluoro modified nucleotide
  modified_base 11: mod_base = OTHER; note = 2'-O-methyl modified nucleotide
  modified_base 12: mod_base = OTHER; note = 2'-fluoro modified nucleotide
  modified_base 13: mod_base = OTHER; note = 2'-fluoro modified nucleotide
  modified_base 14: mod_base = OTHER; note = 2'-O-methyl modified nucleotide
  modified_base 15: mod_base = OTHER; note = 2'-fluoro modified nucleotide
  modified_base 16: mod_base = OTHER; note = 2'-O-methyl modified nucleotide
  modified_base 17: mod_base = OTHER; note = 2'-fluoro modified nucleotide
  modified_base 18: mod_base = OTHER; note = 2'-O-methyl modified nucleotide
  modified_base 19: mod_base = OTHER; note = 2'-O-methyl modified nucleotide
  modified_base 20: mod_base = OTHER; note = 2'-O-methyl modified nucleotide
  modified_base 21: mod_base = OTHER; note = 2'-O-methyl modified nucleotide
  modified_base 22: mod_base = OTHER; note = 2'-O-methyl modified nucleotide
  modified_base 23: mod_base = OTHER; note = 2'-O-methyl modified nucleotide
  modified_base 24: mod_base = OTHER; note = 2'-O-methyl modified nucleotide
  modified_base 25: mod_base = OTHER; note = 2'-O-methyl modified nucleotide
  modified_base 26: mod_base = OTHER; note = 2'-O-methyl modified nucleotide
  modified_base 27: mod_base = OTHER; note = 2'-O-methyl modified nucleotide
  modified_base 28: mod_base = OTHER; note 2'-aminodiethoxymethanol-Adenine-N-Acetylgalactosamine
  modified_base 29: mod_base = OTHER; note 2'-aminodiethoxymethanol-Adenine-N-Acetylgalactosamine
  modified_base 30: mod_base = OTHER; note 2'-aminodiethoxymethanol-Adenine-N-Acetylgalactosamine
  modified_base 31: mod_base = OTHER; note = 2'-O-methyl modified nucleotide
  modified_base 32: mod_base = OTHER; note = 2'-O-methyl modified nucleotide
  modified_base 33: mod_base = OTHER; note = 2'-O-methyl modified nucleotide
  modified_base 34: mod_base = OTHER; note = 2'-O-methyl modified nucleotide
  modified_base 35: mod_base = OTHER; note = 2'-O-methyl modified nucleotide
  modified_base 36: mod_base = OTHER; note = 2'-O-methyl modified nucleotide

SEQ ID NO: 870 - RNA, 36 nt, synthetic construct; identical to SEQ ID NO: 800
  source 1..36: mol_type = other RNA
  modified_base 1: mod_base = OTHER; note = 2'-O-methyl modified nucleotide with phosphorothioate linkage
  modified_base 2: mod_base = OTHER; note = 2'-O-methyl modified nucleotide
  modified_base 3: mod_base = OTHER; note = 2'-fluoro modified nucleotide
  modified_base 4: mod_base = OTHER; note = 2'-O-methyl modified nucleotide
  modified_base 5: mod_base = OTHER; note = 2'-fluoro modified nucleotide
  modified_base 6: mod_base = OTHER; note = 2'-O-methyl modified nucleotide
  modified_base 7: mod_base = OTHER; note = 2'-O-methyl modified nucleotide
  modified_base 8: mod_base = OTHER; note = 2'-fluoro modified nucleotide
  modified_base 9: mod_base = OTHER; note = 2'-O-methyl modified nucleotide
  modified_base 10: mod_base = OTHER; note = 2'-fluoro modified nucleotide
  modified_base 11: mod_base = OTHER; note = 2'-O-methyl modified nucleotide
  modified_base 12: mod_base = OTHER; note = 2'-fluoro modified nucleotide
  modified_base 13: mod_base = OTHER; note = 2'-fluoro modified nucleotide
  modified_base 14: mod_base = OTHER; note = 2'-O-methyl modified nucleotide
  modified_base 15: mod_base = OTHER; note = 2'-fluoro modified nucleotide
  modified_base 16: mod_base = OTHER; note = 2'-O-methyl modified nucleotide
  modified_base 17: mod_base = OTHER; note = 2'-fluoro modified nucleotide
  modified_base 18: mod_base = OTHER; note = 2'-O-methyl modified nucleotide
  modified_base 19: mod_base = OTHER; note = 2'-O-methyl modified nucleotide
  modified_base 20: mod_base = OTHER; note = 2'-O-methyl modified nucleotide
  modified_base 21: mod_base = OTHER; note = 2'-O-methyl modified nucleotide
  modified_base 22: mod_base = OTHER; note = 2'-O-methyl modified nucleotide
  modified_base 23: mod_base = OTHER; note = 2'-O-methyl modified nucleotide
  modified_base 24: mod_base = OTHER; note = 2'-O-methyl modified nucleotide
  modified_base 25: mod_base = OTHER; note = 2'-O-methyl modified nucleotide
  modified_base 26: mod_base = OTHER; note = 2'-O-methyl modified nucleotide
  modified_base 27: mod_base = OTHER; note = 2'-O-methyl modified nucleotide
  modified_base 28: mod_base = OTHER; note 2'-aminodiethoxymethanol-Adenine-N-Acetylgalactosamine
  modified_base 29: mod_base = OTHER; note 2'-aminodiethoxymethanol-Adenine-N-Acetylgalactosamine
  modified_base 30: mod_base = OTHER; note 2'-aminodiethoxymethanol-Adenine-N-Acetylgalactosamine
  modified_base 31: mod_base = OTHER; note = 2'-O-methyl modified nucleotide
  modified_base 32: mod_base = OTHER; note = 2'-O-methyl modified nucleotide
  modified_base 33: mod_base = OTHER; note = 2'-O-methyl modified nucleotide
  modified_base 34: mod_base = OTHER; note = 2'-O-methyl modified nucleotide
  modified_base 35: mod_base = OTHER; note = 2'-O-methyl modified nucleotide
  modified_base 36: mod_base = OTHER; note = 2'-O-methyl modified nucleotide

SEQ ID NO: 871 - RNA, 36 nt, synthetic construct; identical to SEQ ID NO: 801
  source 1..36: mol_type = other RNA
  modified_base 1: mod_base = OTHER; note = 2'-O-methyl modified nucleotide with phosphorothioate linkage
  modified_base 2: mod_base = OTHER; note = 2'-O-methyl modified nucleotide
  modified_base 3: mod_base = OTHER; note = 2'-fluoro modified nucleotide
  modified_base 4: mod_base = OTHER; note = 2'-O-methyl modified nucleotide
  modified_base 5: mod_base = OTHER; note = 2'-fluoro modified nucleotide
  modified_base 6: mod_base = OTHER; note = 2'-O-methyl modified nucleotide
  modified_base 7: mod_base = OTHER; note = 2'-O-methyl modified nucleotide
  modified_base 8: mod_base = OTHER; note = 2'-fluoro modified nucleotide
  modified_base 9: mod_base = OTHER; note = 2'-O-methyl modified nucleotide
  modified_base 10: mod_base = OTHER; note = 2'-fluoro modified nucleotide
  modified_base 11: mod_base = OTHER; note = 2'-O-methyl modified nucleotide
  modified_base 12: mod_base = OTHER; note = 2'-fluoro modified nucleotide
  modified_base 13: mod_base = OTHER; note = 2'-fluoro modified nucleotide
  modified_base 14: mod_base = OTHER; note = 2'-O-methyl modified nucleotide
  modified_base 15: mod_base = OTHER; note = 2'-fluoro modified nucleotide
  modified_base 16: mod_base = OTHER; note = 2'-O-methyl modified nucleotide
  modified_base 17: mod_base = OTHER; note = 2'-fluoro modified nucleotide
  modified_base 18: mod_base = OTHER; note = 2'-O-methyl modified nucleotide
  modified_base 19: mod_base = OTHER; note = 2'-O-methyl modified nucleotide
  modified_base 20: mod_base = OTHER; note = 2'-O-methyl modified nucleotide
  modified_base 21: mod_base = OTHER; note = 2'-O-methyl modified nucleotide
  modified_base 22: mod_base = OTHER; note = 2'-O-methyl modified nucleotide
  modified_base 23: mod_base = OTHER; note = 2'-O-methyl modified nucleotide
  modified_base 24: mod_base = OTHER; note = 2'-O-methyl modified nucleotide
  modified_base 25: mod_base = OTHER; note = 2'-O-methyl modified nucleotide
  modified_base 26: mod_base = OTHER; note = 2'-O-methyl modified nucleotide
  modified_base 27: mod_base = OTHER; note = 2'-O-methyl modified nucleotide
  modified_base 28: mod_base = OTHER; note 2'-aminodiethoxymethanol-Adenine-N-Acetylgalactosamine
  modified_base 29: mod_base = OTHER; note 2'-aminodiethoxymethanol-Adenine-N-Acetylgalactosamine
  modified_base 30: mod_base = OTHER; note 2'-aminodiethoxymethanol-Adenine-N-Acetylgalactosamine
  modified_base 31: mod_base = OTHER; note = 2'-O-methyl modified nucleotide
  modified_base 32: mod_base = OTHER; note = 2'-O-methyl modified nucleotide
  modified_base 33: mod_base = OTHER; note = 2'-O-methyl modified nucleotide
  modified_base 34: mod_base = OTHER; note = 2'-O-methyl modified nucleotide
  modified_base 35: mod_base = OTHER; note = 2'-O-methyl modified nucleotide
  modified_base 36: mod_base = OTHER; note = 2'-O-methyl modified nucleotide

SEQ ID NO: 872 - RNA, 36 nt, synthetic construct; identical to SEQ ID NO: 802
  source 1..36: mol_type = other RNA
  modified_base 1: mod_base = OTHER; note = 2'-O-methyl modified nucleotide with phosphorothioate linkage
  modified_base 2: mod_base = OTHER; note = 2'-O-methyl modified nucleotide
  modified_base 3: mod_base = OTHER; note = 2'-fluoro modified nucleotide
  modified_base 4: mod_base = OTHER; note = 2'-O-methyl modified nucleotide
  modified_base 5: mod_base = OTHER; note = 2'-fluoro modified nucleotide
  modified_base 6: mod_base = OTHER; note = 2'-O-methyl modified nucleotide
  modified_base 7: mod_base = OTHER; note = 2'-O-methyl modified nucleotide
  modified_base 8: mod_base = OTHER; note = 2'-fluoro modified nucleotide
  modified_base 9: mod_base = OTHER; note = 2'-O-methyl modified nucleotide
  modified_base 10: mod_base = OTHER; note = 2'-fluoro modified nucleotide
  modified_base 11: mod_base = OTHER; note = 2'-O-methyl modified nucleotide
  modified_base 12: mod_base = OTHER; note = 2'-fluoro modified nucleotide
  modified_base 13: mod_base = OTHER; note = 2'-fluoro modified nucleotide
  modified_base 14: mod_base = OTHER; note = 2'-O-methyl modified nucleotide
  modified_base 15: mod_base = OTHER; note = 2'-fluoro modified nucleotide
  modified_base 16: mod_base = OTHER; note = 2'-O-methyl modified nucleotide
  modified_base 17: mod_base = OTHER; note = 2'-fluoro modified nucleotide
  modified_base 18: mod_base = OTHER; note = 2'-O-methyl modified nucleotide
  modified_base 19: mod_base = OTHER; note = 2'-O-methyl modified nucleotide
  modified_base 20: mod_base = OTHER; note = 2'-O-methyl modified nucleotide
  modified_base 21: mod_base = OTHER; note = 2'-O-methyl modified nucleotide
  modified_base 22: mod_base = OTHER; note = 2'-O-methyl modified nucleotide
  modified_base 23: mod_base = OTHER; note = 2'-O-methyl modified nucleotide
  modified_base 24: mod_base = OTHER; note = 2'-O-methyl modified nucleotide
  modified_base 25: mod_base = OTHER; note = 2'-O-methyl modified nucleotide
  modified_base 26: mod_base = OTHER; note = 2'-O-methyl modified nucleotide
  modified_base 27: mod_base = OTHER; note = 2'-O-methyl modified nucleotide
  modified_base 28: mod_base = OTHER; note 2'-aminodiethoxymethanol-Adenine-N-Acetylgalactosamine
  modified_base 29: mod_base = OTHER; note 2'-aminodiethoxymethanol-Adenine-N-Acetylgalactosamine
  modified_base 30: mod_base = OTHER; note 2'-aminodiethoxymethanol-Adenine-N-Acetylgalactosamine
  modified_base 31: mod_base = OTHER; note = 2'-O-methyl modified nucleotide
  modified_base 32: mod_base = OTHER; note = 2'-O-methyl modified nucleotide
  modified_base 33: mod_base = OTHER; note = 2'-O-methyl modified nucleotide
  modified_base 34: mod_base = OTHER; note = 2'-O-methyl modified nucleotide
  modified_base 35: mod_base = OTHER; note = 2'-O-methyl modified nucleotide
  modified_base 36: mod_base = OTHER; note = 2'-O-methyl modified nucleotide

SEQ ID NO: 873 - RNA, 36 nt, synthetic construct; identical to SEQ ID NO: 803
  source 1..36: mol_type = other RNA
  modified_base 1: mod_base = OTHER; note = 2'-O-methyl modified nucleotide with phosphorothioate linkage
  modified_base 2: mod_base = OTHER; note = 2'-O-methyl modified nucleotide
  modified_base 3: mod_base = OTHER; note = 2'-fluoro modified nucleotide
  modified_base 4: mod_base = OTHER; note = 2'-O-methyl modified nucleotide
  modified_base 5: mod_base = OTHER; note = 2'-fluoro modified nucleotide
  modified_base 6: mod_base = OTHER; note = 2'-O-methyl modified nucleotide
  modified_base 7: mod_base = OTHER; note = 2'-O-methyl modified nucleotide
  modified_base 8: mod_base = OTHER; note = 2'-fluoro modified nucleotide
  modified_base 9: mod_base = OTHER; note = 2'-O-methyl modified nucleotide
  modified_base 10: mod_base = OTHER; note = 2'-fluoro modified nucleotide
  modified_base 11: mod_base = OTHER; note = 2'-O-methyl modified nucleotide
  modified_base 12: mod_base = OTHER; note = 2'-fluoro modified nucleotide
  modified_base 13: mod_base = OTHER; note = 2'-fluoro modified nucleotide
  modified_base 14: mod_base = OTHER; note = 2'-O-methyl modified nucleotide
  modified_base 15: mod_base = OTHER; note = 2'-fluoro modified nucleotide
  modified_base 16: mod_base = OTHER; note = 2'-O-methyl modified nucleotide
  modified_base 17: mod_base = OTHER; note = 2'-fluoro modified nucleotide
  modified_base 18: mod_base = OTHER; note = 2'-O-methyl modified nucleotide
  modified_base 19: mod_base = OTHER; note = 2'-O-methyl modified nucleotide
  modified_base 20: mod_base = OTHER; note = 2'-O-methyl modified nucleotide
  modified_base 21: mod_base = OTHER; note = 2'-O-methyl modified nucleotide
  modified_base 22: mod_base = OTHER; note = 2'-O-methyl modified nucleotide
  modified_base 23: mod_base = OTHER; note = 2'-O-methyl modified nucleotide
  modified_base 24: mod_base = OTHER; note = 2'-O-methyl modified nucleotide
  modified_base 25: mod_base = OTHER; note = 2'-O-methyl modified nucleotide
  modified_base 26: mod_base = OTHER; note = 2'-O-methyl modified nucleotide
  modified_base 27: mod_base = OTHER; note = 2'-O-methyl modified nucleotide
  modified_base 28: mod_base = OTHER; note 2'-aminodiethoxymethanol-Adenine-N-Acetylgalactosamine
  modified_base 29: mod_base = OTHER; note 2'-aminodiethoxymethanol-Adenine-N-Acetylgalactosamine
  modified_base 30: mod_base = OTHER; note 2'-aminodiethoxymethanol-Adenine-N-Acetylgalactosamine
  modified_base 31: mod_base = OTHER; note = 2'-O-methyl modified nucleotide
  modified_base 32: mod_base = OTHER; note = 2'-O-methyl modified nucleotide
  modified_base 33: mod_base = OTHER; note = 2'-O-methyl modified nucleotide
  modified_base 34: mod_base = OTHER; note = 2'-O-methyl modified nucleotide
  modified_base 35: mod_base = OTHER; note = 2'-O-methyl modified nucleotide
  modified_base 36: mod_base = OTHER; note = 2'-O-methyl modified nucleotide

SEQ ID NO: 874 - RNA, 22 nt, synthetic construct
  source 1..22: mol_type = other RNA
  modified_base 1: mod_base = OTHER; note = 4'-O-monomethylphosphonate-2'-O-methyl uridine phosphorothioate
  modified_base 2: mod_base = OTHER; note = 2'-fluoro modified nucleotide with phosphorothioate linkage
  modified_base 3: mod_base = OTHER; note = 2'-fluoro modified nucleotide
  modified_base 4: mod_base = OTHER; note = 2'-fluoro modified nucleotide
  modified_base 5: mod_base = OTHER; note = 2'-fluoro modified nucleotide
  modified_base 6: mod_base = OTHER; note = 2'-O-methyl modified nucleotide
  modified_base 7: mod_base = OTHER; note = 2'-fluoro modified nucleotide
  modified_base 8: mod_base = OTHER; note = 2'-O-methyl modified nucleotide
  modified_base 9: mod_base = OTHER; note = 2'-O-methyl modified nucleotide
  modified_base 10: mod_base = OTHER; note = 2'-fluoro modified nucleotide
  modified_base 11: mod_base = OTHER; note = 2'-O-methyl modified nucleotide
  modified_base 12: mod_base = OTHER; note = 2'-O-methyl modified nucleotide
  modified_base 13: mod_base = OTHER; note = 2'-O-methyl modified nucleotide
  modified_base 14: mod_base = OTHER; note = 2'-fluoro modified nucleotide
  modified_base 15: mod_base = OTHER; note = 2'-O-methyl modified nucleotide
  modified_base 16: mod_base = OTHER; note = 2'-fluoro modified nucleotide
  modified_base 17: mod_base = OTHER; note = 2'-O-methyl modified nucleotide
  modified_base 18: mod_base = OTHER; note = 2'-O-methyl modified nucleotide
  modified_base 19: mod_base = OTHER; note = 2'-fluoro modified nucleotide
  modified_base 20: mod_base = OTHER; note = 2'-O-methyl modified nucleotide with phosphorothioate linkage
  modified_base 21: mod_base = OTHER; note = 2'-O-methyl modified nucleotide with phosphorothioate linkage
  modified_base 22: mod_base = OTHER; note = 2'-O-methyl modified nucleotide
ttgtgggtttcaatctttttgg

SEQ ID NO: 875 - RNA, 22 nt, synthetic construct
  source 1..22: mol_type = other RNA
  modified_base 1: mod_base = OTHER; note = 4'-O-monomethylphosphonate-2'-O-methyl uridine phosphorothioate
  modified_base 2: mod_base = OTHER; note = 2'-fluoro modified nucleotide with phosphorothioate linkage
  modified_base 3: mod_base = OTHER; note = 2'-fluoro modified nucleotide
  modified_base 4: mod_base = OTHER; note = 2'-fluoro modified nucleotide
  modified_base 5: mod_base = OTHER; note = 2'-fluoro modified nucleotide
  modified_base 6: mod_base = OTHER; note = 2'-O-methyl modified nucleotide
  modified_base 7: mod_base = OTHER; note = 2'-fluoro modified nucleotide
  modified_base 8: mod_base = OTHER; note = 2'-O-methyl modified nucleotide
  modified_base 9: mod_base = OTHER; note = 2'-O-methyl modified nucleotide
  modified_base 10: mod_base = OTHER; note = 2'-fluoro modified nucleotide
  modified_base 11: mod_base = OTHER; note = 2'-O-methyl modified nucleotide
  modified_base 12: mod_base = OTHER; note = 2'-O-methyl modified nucleotide
  modified_base 13: mod_base = OTHER; note = 2'-O-methyl modified nucleotide
  modified_base 14: mod_base = OTHER; note = 2'-fluoro modified nucleotide
  modified_base 15: mod_base = OTHER; note = 2'-O-methyl modified nucleotide
  modified_base 16: mod_base = OTHER; note = 2'-fluoro modified nucleotide
  modified_base 17: mod_base = OTHER; note = 2'-O-methyl modified nucleotide
  modified_base 18: mod_base = OTHER; note = 2'-O-methyl modified nucleotide
  modified_base 19: mod_base = OTHER; note = 2'-fluoro modified nucleotide
  modified_base 20: mod_base = OTHER; note = 2'-O-methyl modified nucleotide with phosphorothioate linkage
  modified_base 21: mod_base = OTHER; note = 2'-O-methyl modified nucleotide with phosphorothioate linkage
  modified_base 22: mod_base = OTHER; note = 2'-O-methyl modified nucleotide
tagacattgctgagatgccggg

SEQ ID NO: 876 - RNA, 22 nt, synthetic construct
  source 1..22: mol_type = other RNA
  modified_base 1: mod_base = OTHER; note = 4'-O-monomethylphosphonate-2'-O-methyl uridine phosphorothioate
  modified_base 2: mod_base = OTHER; note = 2'-fluoro modified nucleotide with phosphorothioate linkage
  modified_base 3: mod_base = OTHER; note = 2'-fluoro modified nucleotide
  modified_base 4: mod_base = OTHER; note = 2'-fluoro modified nucleotide
  modified_base 5: mod_base = OTHER; note = 2'-fluoro modified nucleotide
  modified_base 6: mod_base = OTHER; note = 2'-O-methyl modified nucleotide
  modified_base 7: mod_base = OTHER; note = 2'-fluoro modified nucleotide
  modified_base 8: mod_base = OTHER; note = 2'-O-methyl modified nucleotide
  modified_base 9: mod_base = OTHER; note = 2'-O-methyl modified nucleotide
  modified_base 10: mod_base = OTHER; note = 2'-fluoro modified nucleotide
  modified_base 11: mod_base = OTHER; note = 2'-O-methyl modified nucleotide
  modified_base 12: mod_base = OTHER; note = 2'-O-methyl modified nucleotide
  modified_base 13: mod_base = OTHER; note = 2'-O-methyl modified nucleotide
  modified_base 14: mod_base = OTHER; note = 2'-fluoro modified nucleotide
  modified_base 15: mod_base = OTHER; note = 2'-O-methyl modified nucleotide
  modified_base 16: mod_base = OTHER; note = 2'-fluoro modified nucleotide
  modified_base 17: mod_base = OTHER; note = 2'-O-methyl modified nucleotide
  modified_base 18: mod_base = OTHER; note = 2'-O-methyl modified nucleotide
  modified_base 19: mod_base = OTHER; note = 2'-fluoro modified nucleotide
  modified_base 20: mod_base = OTHER; note = 2'-O-methyl modified nucleotide with phosphorothioate linkage
  modified_base 21: mod_base = OTHER; note = 2'-O-methyl modified nucleotide with phosphorothioate linkage
  modified_base 22: mod_base = OTHER; note = 2'-O-methyl modified nucleotide
tctttttttttccacactctgg

SEQ ID NO: 877 - RNA, 22 nt, synthetic construct
  source 1..22: mol_type = other RNA
  modified_base 1: mod_base = OTHER; note = 4'-O-monomethylphosphonate-2'-O-methyl uridine phosphorothioate
  modified_base 2: mod_base = OTHER; note = 2'-fluoro modified nucleotide with phosphorothioate linkage
  modified_base 3: mod_base = OTHER; note = 2'-fluoro modified nucleotide
  modified_base 4: mod_base = OTHER; note = 2'-fluoro modified nucleotide
  modified_base 5: mod_base = OTHER; note = 2'-fluoro modified nucleotide
  modified_base 6: mod_base = OTHER; note = 2'-O-methyl modified nucleotide
  modified_base 7: mod_base = OTHER; note = 2'-fluoro modified nucleotide
  modified_base 8: mod_base = OTHER; note = 2'-O-methyl modified nucleotide
  modified_base 9: mod_base = OTHER; note = 2'-O-methyl modified nucleotide
  modified_base 10: mod_base = OTHER; note = 2'-fluoro modified nucleotide
  modified_base 11: mod_base = OTHER; note = 2'-O-methyl modified nucleotide
  modified_base 12: mod_base = OTHER; note = 2'-O-methyl modified nucleotide
  modified_base 13: mod_base = OTHER; note = 2'-O-methyl modified nucleotide
  modified_base 14: mod_base = OTHER; note = 2'-fluoro modified nucleotide
  modified_base 15: mod_base = OTHER; note = 2'-O-methyl modified nucleotide
  modified_base 16: mod_base = OTHER; note = 2'-fluoro modified nucleotide
  modified_base 17: mod_base = OTHER; note = 2'-O-methyl modified nucleotide
  modified_base 18: mod_base = OTHER; note = 2'-O-methyl modified nucleotide
  modified_base 19: mod_base = OTHER; note = 2'-fluoro modified nucleotide
  modified_base 20: mod_base = OTHER; note = 2'-O-methyl modified nucleotide with phosphorothioate linkage
  modified_base 21: mod_base = OTHER; note = 2'-O-methyl modified nucleotide with phosphorothioate linkage
  modified_base 22: mod_base = OTHER; note = 2'-O-methyl modified nucleotide
ttgaccagcagcttcgtcttgg

SEQ ID NO: 878 - RNA, 22 nt, synthetic construct
  source 1..22: mol_type = other RNA
  modified_base 1: mod_base = OTHER; note = 4'-O-monomethylphosphonate-2'-O-methyl uridine phosphorothioate
  modified_base 2: mod_base = OTHER; note = 2'-fluoro modified nucleotide with phosphorothioate linkage
  modified_base 3: mod_base = OTHER; note = 2'-fluoro modified nucleotide
  modified_base 4: mod_base = OTHER; note = 2'-fluoro modified nucleotide
  modified_base 5: mod_base = OTHER; note = 2'-fluoro modified nucleotide
  modified_base 6: mod_base = OTHER; note = 2'-O-methyl modified nucleotide
  modified_base 7: mod_base = OTHER; note = 2'-fluoro modified nucleotide
  modified_base 8: mod_base = OTHER; note = 2'-O-methyl modified nucleotide
  modified_base 9: mod_base = OTHER; note = 2'-O-methyl modified nucleotide
  modified_base 10: mod_base = OTHER; note = 2'-fluoro modified nucleotide
  modified_base 11: mod_base = OTHER; note = 2'-O-methyl modified nucleotide
  modified_base 12: mod_base = OTHER; note = 2'-O-methyl modified nucleotide
  modified_base 13: mod_base = OTHER; note = 2'-O-methyl modified nucleotide
  modified_base 14: mod_base = OTHER; note = 2'-fluoro modified nucleotide
  modified_base 15: mod_base = OTHER; note = 2'-O-methyl modified nucleotide
  modified_base 16: mod_base = OTHER; note = 2'-fluoro modified nucleotide
  modified_base 17: mod_base = OTHER; note = 2'-O-methyl modified nucleotide
  modified_base 18: mod_base = OTHER; note = 2'-O-methyl modified nucleotide
  modified_base 19: mod_base = OTHER; note = 2'-fluoro modified nucleotide
  modified_base 20: mod_base = OTHER; note = 2'-O-methyl modified nucleotide with phosphorothioate linkage
  modified_base 21: mod_base = OTHER; note = 2'-O-methyl modified nucleotide with phosphorothioate linkage
  modified_base 22: mod_base = OTHER; note = 2'-O-methyl modified nucleotide
ttcgcttccagtcccgtcttgg

SEQ ID NO: 879 - RNA, 22 nt, synthetic construct
  source 1..22: mol_type = other RNA
  modified_base 1: mod_base = OTHER; note = 4'-O-monomethylphosphonate-2'-O-methyl uridine phosphorothioate
  modified_base 2: mod_base = OTHER; note = 2'-fluoro modified nucleotide with phosphorothioate linkage
  modified_base 3: mod_base = OTHER; note = 2'-fluoro modified nucleotide
  modified_base 4: mod_base = OTHER; note = 2'-fluoro modified nucleotide
  modified_base 5: mod_base = OTHER; note = 2'-fluoro modified nucleotide
  modified_base 6: mod_base = OTHER; note = 2'-O-methyl modified nucleotide
  modified_base 7: mod_base = OTHER; note = 2'-fluoro modified nucleotide
  modified_base 8: mod_base = OTHER; note = 2'-O-methyl modified nucleotide
  modified_base 9: mod_base = OTHER; note = 2'-O-methyl modified nucleotide
  modified_base 10: mod_base = OTHER; note = 2'-fluoro modified nucleotide
  modified_base 11: mod_base = OTHER; note = 2'-O-methyl modified nucleotide
  modified_base 12: mod_base = OTHER; note = 2'-O-methyl modified nucleotide
  modified_base 13: mod_base = OTHER; note = 2'-O-methyl modified nucleotide
  modified_base 14: mod_base = OTHER; note = 2'-fluoro modified nucleotide
  modified_base 15: mod_base = OTHER; note = 2'-O-methyl modified nucleotide
  modified_base 16: mod_base = OTHER; note = 2'-fluoro modified nucleotide
  modified_base 17: mod_base = OTHER; note = 2'-O-methyl modified nucleotide
  modified_base 18: mod_base = OTHER; note = 2'-O-methyl modified nucleotide
  modified_base 19: mod_base = OTHER; note = 2'-fluoro modified nucleotide
  modified_base 20: mod_base = OTHER; note = 2'-O-methyl modified nucleotide with phosphorothioate linkage
  modified_base 21: mod_base = OTHER; note = 2'-O-methyl modified nucleotide with phosphorothioate linkage
  modified_base 22: mod_base = OTHER; note = 2'-O-methyl modified nucleotide
tcgatcttcgttttaccatcgg

SEQ ID NO: 880 - RNA, 22 nt, synthetic construct
  source 1..22: mol_type = other RNA
  modified_base 1: mod_base = OTHER; note = 4'-O-monomethylphosphonate-2'-O-methyl uridine phosphorothioate
  modified_base 2: mod_base = OTHER; note = 2'-fluoro modified nucleotide with phosphorothioate linkage
  modified_base 3: mod_base = OTHER; note = 2'-fluoro modified nucleotide
  modified_base 4: mod_base = OTHER; note = 2'-fluoro modified nucleotide
  modified_base 5: mod_base = OTHER; note = 2'-fluoro modified nucleotide
  modified_base 6: mod_base = OTHER; note = 2'-O-methyl modified nucleotide
  modified_base 7: mod_base = OTHER; note = 2'-fluoro modified nucleotide
  modified_base 8: mod_base = OTHER; note = 2'-O-methyl modified nucleotide
  modified_base 9: mod_base = OTHER; note = 2'-O-methyl modified nucleotide
  modified_base 10: mod_base = OTHER; note = 2'-fluoro modified nucleotide
  modified_base 11: mod_base = OTHER; note = 2'-O-methyl modified nucleotide
  modified_base 12: mod_base = OTHER; note = 2'-O-methyl modified nucleotide
  modified_base 13: mod_base = OTHER; note = 2'-O-methyl modified nucleotide
  modified_base 14: mod_base = OTHER; note = 2'-fluoro modified nucleotide
  modified_base 15: mod_base = OTHER; note = 2'-O-methyl modified nucleotide
  modified_base 16: mod_base = OTHER; note = 2'-fluoro modified nucleotide
  modified_base 17: mod_base = OTHER; note = 2'-O-methyl modified nucleotide
  modified_base 18: mod_base = OTHER; note = 2'-O-methyl modified nucleotide
  modified_base 19: mod_base = OTHER; note = 2'-fluoro modified nucleotide
  modified_base 20: mod_base = OTHER; note = 2'-O-methyl modified nucleotide with phosphorothioate linkage
  modified_base 21: mod_base = OTHER; note = 2'-O-methyl modified nucleotide with phosphorothioate linkage
  modified_base 22: mod_base = OTHER; note = 2'-O-methyl modified nucleotide
tcaactggtttgtagactatgg

SEQ ID NO: 881 - RNA, 22 nt, synthetic construct
  source 1..22: mol_type = other RNA
  modified_base 1: mod_base = OTHER; note = 4'-O-monomethylphosphonate-2'-O-methyl uridine phosphorothioate
  modified_base 2: mod_base = OTHER; note = 2'-fluoro modified nucleotide with phosphorothioate linkage
  modified_base 3: mod_base = OTHER; note = 2'-fluoro modified nucleotide
  modified_base 4: mod_base = OTHER; note = 2'-fluoro modified nucleotide
  modified_base 5: mod_base = OTHER; note = 2'-fluoro modified nucleotide
  modified_base 6: mod_base = OTHER; note = 2'-O-methyl modified nucleotide
  modified_base 7: mod_base = OTHER; note = 2'-fluoro modified nucleotide
  modified_base 8: mod_base = OTHER; note = 2'-O-methyl modified nucleotide
  modified_base 9: mod_base = OTHER; note = 2'-O-methyl modified nucleotide
  modified_base 10: mod_base = OTHER; note = 2'-fluoro modified nucleotide
  modified_base 11: mod_base = OTHER; note = 2'-O-methyl modified nucleotide
  modified_base 12: mod_base = OTHER; note = 2'-O-methyl modified nucleotide
  modified_base 13: mod_base = OTHER; note = 2'-O-methyl modified nucleotide
  modified_base 14: mod_base = OTHER; note = 2'-fluoro modified nucleotide
  modified_base 15: mod_base = OTHER; note = 2'-O-methyl modified nucleotide
  modified_base 16: mod_base = OTHER; note = 2'-fluoro modified nucleotide
  modified_base 17: mod_base = OTHER; note = 2'-O-methyl modified nucleotide
  modified_base 18: mod_base = OTHER; note = 2'-O-methyl modified nucleotide
  modified_base 19: mod_base = OTHER; note = 2'-fluoro modified nucleotide
  modified_base 20: mod_base = OTHER; note = 2'-O-methyl modified nucleotide with phosphorothioate linkage
  modified_base 21: mod_base = OTHER; note = 2'-O-methyl modified nucleotide with phosphorothioate linkage
  modified_base 22: mod_base = OTHER; note = 2'-O-methyl modified nucleotide
ttcaactggtttgtagactagg

SEQ ID NO: 882 - RNA, 22 nt, synthetic construct
  source 1..22: mol_type = other RNA
  modified_base 1: mod_base = OTHER; note = 4'-O-monomethylphosphonate-2'-O-methyl uridine phosphorothioate
  modified_base 2: mod_base = OTHER; note = 2'-fluoro modified nucleotide with phosphorothioate linkage
  modified_base 3: mod_base = OTHER; note = 2'-fluoro modified nucleotide
  modified_base 4: mod_base = OTHER; note = 2'-fluoro modified nucleotide
  modified_base 5: mod_base = OTHER; note = 2'-fluoro modified nucleotide
  modified_base 6: mod_base = OTHER; note = 2'-O-methyl modified nucleotide
  modified_base 7: mod_base = OTHER; note = 2'-fluoro modified nucleotide
  modified_base 8: mod_base = OTHER; note = 2'-O-methyl modified nucleotide
  modified_base 9: mod_base = OTHER; note = 2'-O-methyl modified nucleotide
  modified_base 10: mod_base = OTHER; note = 2'-fluoro modified nucleotide
  modified_base 11: mod_base = OTHER; note = 2'-O-methyl modified nucleotide
  modified_base 12: mod_base = OTHER; note = 2'-O-methyl modified nucleotide
  modified_base 13: mod_base = OTHER; note = 2'-O-methyl modified nucleotide
  modified_base 14: mod_base = OTHER; note = 2'-fluoro modified nucleotide
  modified_base 15: mod_base = OTHER; note = 2'-O-methyl modified nucleotide
  modified_base 16: mod_base = OTHER; note = 2'-fluoro modified nucleotide
  modified_base 17: mod_base = OTHER; note = 2'-O-methyl modified nucleotide
  modified_base 18: mod_base = OTHER; note = 2'-O-methyl modified nucleotide
  modified_base 19: mod_base = OTHER; note = 2'-fluoro modified nucleotide
  modified_base 20: mod_base = OTHER; note = 2'-O-methyl modified nucleotide with phosphorothioate linkage
  modified_base 21: mod_base = OTHER; note = 2'-O-methyl modified nucleotide with phosphorothioate linkage
  modified_base 22: mod_base = OTHER; note = 2'-O-methyl modified nucleotide
tggtcaactggtttgtagacgg

SEQ ID NO: 883 - RNA, 22 nt, synthetic construct
  source 1..22: mol_type = other RNA
  modified_base 1: mod_base = OTHER; note = 4'-O-monomethylphosphonate-2'-O-methyl uridine phosphorothioate
  modified_base 2: mod_base = OTHER; note = 2'-fluoro modified nucleotide with phosphorothioate linkage
  modified_base 3: mod_base = OTHER; note = 2'-fluoro modified nucleotide
  modified_base 4: mod_base = OTHER; note = 2'-fluoro modified nucleotide
  modified_base 5: mod_base = OTHER; note = 2'-fluoro modified nucleotide
  modified_base 6: mod_base = OTHER; note = 2'-O-methyl modified nucleotide
  modified_base 7: mod_base = OTHER; note = 2'-fluoro modified nucleotide
  modified_base 8: mod_base = OTHER; note = 2'-O-methyl modified nucleotide
  modified_base 9: mod_base = OTHER; note = 2'-O-methyl modified nucleotide
  modified_base 10: mod_base = OTHER; note = 2'-fluoro modified nucleotide
  modified_base 11: mod_base = OTHER; note = 2'-O-methyl modified nucleotide
  modified_base 12: mod_base = OTHER; note = 2'-O-methyl modified nucleotide
  modified_base 13: mod_base = OTHER; note = 2'-O-methyl modified nucleotide
  modified_base 14: mod_base = OTHER; note = 2'-fluoro modified nucleotide
  modified_base 15: mod_base = OTHER; note = 2'-O-methyl modified nucleotide
  modified_base 16: mod_base = OTHER; note = 2'-fluoro modified nucleotide
  modified_base 17: mod_base = OTHER; note = 2'-O-methyl modified nucleotide
  modified_base 18: mod_base = OTHER; note = 2'-O-methyl modified nucleotide
  modified_base 19: mod_base = OTHER; note = 2'-fluoro modified nucleotide
  modified_base 20: mod_base = OTHER; note = 2'-O-methyl modified nucleotide with phosphorothioate linkage
  modified_base 21: mod_base = OTHER; note = 2'-O-methyl modified nucleotide with phosphorothioate linkage
  modified_base 22: mod_base = OTHER; note = 2'-O-methyl modified nucleotide
tccacacttggaggtcacctgg

SEQ ID NO: 884 - RNA, 22 nt, synthetic construct
  source 1..22: mol_type = other RNA
  modified_base 1: mod_base = OTHER; note = 4'-O-monomethylphosphonate-2'-O-methyl uridine phosphorothioate
  modified_base 2: mod_base = OTHER; note = 2'-fluoro modified nucleotide with phosphorothioate linkage
  modified_base 3: mod_base = OTHER; note = 2'-fluoro modified nucleotide
  modified_base 4: mod_base = OTHER; note = 2'-fluoro modified nucleotide
  modified_base 5: mod_base = OTHER; note = 2'-fluoro modified nucleotide
  modified_base 6: mod_base = OTHER; note = 2'-O-methyl modified nucleotide
  modified_base 7: mod_base = OTHER; note = 2'-fluoro modified nucleotide
  modified_base 8: mod_base = OTHER; note = 2'-O-methyl modified nucleotide
  modified_base 9: mod_base = OTHER; note = 2'-O-methyl modified nucleotide
  modified_base 10: mod_base = OTHER; note = 2'-fluoro modified nucleotide
  modified_base 11: mod_base = OTHER; note = 2'-O-methyl modified nucleotide
  modified_base 12: mod_base = OTHER; note = 2'-O-methyl modified nucleotide
  modified_base 13: mod_base = OTHER; note = 2'-O-methyl modified nucleotide
  modified_base 14: mod_base = OTHER; note = 2'-fluoro modified nucleotide
  modified_base 15: mod_base = OTHER; note = 2'-O-methyl modified nucleotide
  modified_base 16: mod_base = OTHER; note = 2'-fluoro modified nucleotide
  modified_base 17: mod_base = OTHER; note = 2'-O-methyl modified nucleotide
  modified_base 18: mod_base = OTHER; note = 2'-O-methyl modified nucleotide
  modified_base 19: mod_base = OTHER; note = 2'-fluoro modified nucleotide
  modified_base 20: mod_base = OTHER; note = 2'-O-methyl modified nucleotide with phosphorothioate linkage
  modified_base 21: mod_base = OTHER; note = 2'-O-methyl modified nucleotide with phosphorothioate linkage
  modified_base 22: mod_base = OTHER; note = 2'-O-methyl modified nucleotide
tttccacctggccacctcctgg

SEQ ID NO: 885 - RNA, 22 nt, synthetic construct
  source 1..22: mol_type = other RNA
  modified_base 1: mod_base = OTHER; note = 4'-O-monomethylphosphonate-2'-O-methyl uridine phosphorothioate
  modified_base 2: mod_base = OTHER; note = 2'-fluoro modified nucleotide with phosphorothioate linkage
  modified_base 3: mod_base = OTHER; note = 2'-fluoro modified nucleotide
  modified_base 4: mod_base = OTHER; note = 2'-fluoro modified nucleotide
  modified_base 5: mod_base = OTHER; note = 2'-fluoro modified nucleotide
  modified_base 6: mod_base = OTHER; note = 2'-O-methyl modified nucleotide
  modified_base 7: mod_base = OTHER; note = 2'-fluoro modified nucleotide
  modified_base 8: mod_base = OTHER; note = 2'-O-methyl modified nucleotide
  modified_base 9: mod_base = OTHER; note = 2'-O-methyl modified nucleotide
  modified_base 10: mod_base = OTHER; note = 2'-fluoro modified nucleotide
  modified_base 11: mod_base = OTHER; note = 2'-O-methyl modified nucleotide
  modified_base 12: mod_base = OTHER; note = 2'-O-methyl modified nucleotide
  modified_base 13: mod_base = OTHER; note = 2'-O-methyl modified nucleotide
  modified_base 14: mod_base = OTHER; note = 2'-fluoro modified nucleotide
  modified_base 15: mod_base = OTHER; note = 2'-O-methyl modified nucleotide
  modified_base 16: mod_base = OTHER; note = 2'-fluoro modified nucleotide
  modified_base 17: mod_base = OTHER; note = 2'-O-methyl modified nucleotide
  modified_base 18: mod_base = OTHER; note = 2'-O-methyl modified nucleotide
  modified_base 19: mod_base = OTHER; note = 2'-fluoro modified nucleotide
  modified_base 20: mod_base = OTHER; note = 2'-O-methyl modified nucleotide with phosphorothioate linkage
  modified_base 21: mod_base = OTHER; note = 2'-O-methyl modified nucleotide with phosphorothioate linkage
  modified_base 22: mod_base = OTHER; note = 2'-O-methyl modified nucleotide
tcagattttacttccacctggg

SEQ ID NO: 886 - RNA, 22 nt, synthetic construct
  source 1..22: mol_type = other RNA
  modified_base 1: mod_base = OTHER; note = 4'-O-monomethylphosphonate-2'-O-methyl uridine phosphorothioate
  modified_base 2: mod_base = OTHER; note = 2'-fluoro modified nucleotide with phosphorothioate linkage
  modified_base 3: mod_base = OTHER; note = 2'-fluoro modified nucleotide
  modified_base 4: mod_base = OTHER; note = 2'-fluoro modified nucleotide
  modified_base 5: mod_base = OTHER; note = 2'-fluoro modified nucleotide
  modified_base 6: mod_base = OTHER; note = 2'-O-methyl modified nucleotide
  modified_base 7: mod_base = OTHER; note = 2'-fluoro modified nucleotide
  modified_base 8: mod_base = OTHER; note = 2'-O-methyl modified nucleotide
  modified_base 9: mod_base = OTHER; note = 2'-O-methyl modified nucleotide
  modified_base 10: mod_base = OTHER; note = 2'-fluoro modified nucleotide
  modified_base 11: mod_base = OTHER; note = 2'-O-methyl modified nucleotide
  modified_base 12: mod_base = OTHER; note = 2'-O-methyl modified nucleotide
  modified_base 13: mod_base = OTHER; note = 2'-O-methyl modified nucleotide
  modified_base 14: mod_base = OTHER; note = 2'-fluoro modified nucleotide
  modified_base 15: mod_base = OTHER; note = 2'-O-methyl modified nucleotide
  modified_base 16: mod_base = OTHER; note = 2'-fluoro modified nucleotide
  modified_base 17: mod_base = OTHER; note = 2'-O-methyl modified nucleotide
  modified_base 18: mod_base = OTHER; note = 2'-O-methyl modified nucleotide
  modified_base 19: mod_base = OTHER; note = 2'-fluoro modified nucleotide
  modified_base 20: mod_base = OTHER; note = 2'-O-methyl modified nucleotide with phosphorothioate linkage
  modified_base 21: mod_base = OTHER; note = 2'-O-methyl modified nucleotide with phosphorothioate linkage
  modified_base 22: mod_base = OTHER; note = 2'-O-methyl modified nucleotide
ttcagattttacttccacctgg

SEQ ID NO: 887 - RNA, 22 nt, synthetic construct
  source 1..22: mol_type = other RNA
  modified_base 1: mod_base = OTHER; note = 4'-O-monomethylphosphonate-2'-O-methyl uridine phosphorothioate
  modified_base 2: mod_base = OTHER; note = 2'-fluoro modified nucleotide with phosphorothioate linkage
  modified_base 3: mod_base = OTHER; note = 2'-fluoro modified nucleotide
  modified_base 4: mod_base = OTHER; note = 2'-fluoro modified nucleotide
  modified_base 5: mod_base = OTHER; note = 2'-fluoro modified nucleotide
  modified_base 6: mod_base = OTHER; note = 2'-O-methyl modified nucleotide
  modified_base 7: mod_base = OTHER; note = 2'-fluoro modified nucleotide
  modified_base 8: mod_base = OTHER; note = 2'-O-methyl modified nucleotide
  modified_base 9: mod_base = OTHER; note = 2'-O-methyl modified nucleotide
  modified_base 10: mod_base = OTHER; note = 2'-fluoro modified nucleotide
  modified_base 11: mod_base = OTHER; note = 2'-O-methyl modified nucleotide
  modified_base 12: mod_base = OTHER; note = 2'-O-methyl modified nucleotide
  modified_base 13: mod_base = OTHER; note = 2'-O-methyl modified nucleotide
  modified_base 14: mod_base = OTHER; note = 2'-fluoro modified nucleotide
  modified_base 15: mod_base = OTHER; note = 2'-O-methyl modified nucleotide
  modified_base 16: mod_base = OTHER; note = 2'-fluoro modified nucleotide
  modified_base 17: mod_base = OTHER; note = 2'-O-methyl modified nucleotide
  modified_base 18: mod_base = OTHER; note = 2'-O-methyl modified nucleotide
  modified_base 19: mod_base = OTHER; note = 2'-fluoro modified nucleotide
  modified_base 20: mod_base = OTHER; note = 2'-O-methyl modified nucleotide with phosphorothioate linkage
  modified_base 21: mod_base = OTHER; note = 2'-O-methyl modified nucleotide with phosphorothioate linkage
  modified_base 22: mod_base = OTHER; note = 2'-O-methyl modified nucleotide
tagcttctcagattttacttgg

SEQ ID NO: 888 - RNA, 22 nt, synthetic construct
  source 1..22: mol_type = other RNA
  modified_base 1: mod_base = OTHER; note = 4'-O-monomethylphosphonate-2'-O-methyl uridine phosphorothioate
  modified_base 2: mod_base = OTHER; note = 2'-fluoro modified nucleotide with phosphorothioate linkage
  modified_base 3: mod_base = OTHER; note = 2'-fluoro modified nucleotide
  modified_base 4: mod_base = OTHER; note = 2'-fluoro modified nucleotide
  modified_base 5: mod_base = OTHER; note = 2'-fluoro modified nucleotide
  modified_base 6: mod_base = OTHER; note = 2'-O-methyl modified nucleotide
  modified_base 7: mod_base = OTHER; note = 2'-fluoro modified nucleotide
  modified_base 8: mod_base = OTHER; note = 2'-O-methyl modified nucleotide
  modified_base 9: mod_base = OTHER; note = 2'-O-methyl modified nucleotide
  modified_base 10: mod_base = OTHER; note = 2'-fluoro modified nucleotide
  modified_base 11: mod_base = OTHER; note = 2'-O-methyl modified nucleotide
  modified_base 12: mod_base = OTHER; note = 2'-O-methyl modified nucleotide
  modified_base 13: mod_base = OTHER; note = 2'-O-methyl modified nucleotide
  modified_base 14: mod_base = OTHER; note = 2'-fluoro modified nucleotide
  modified_base 15: mod_base = OTHER; note = 2'-O-methyl modified nucleotide
  modified_base 16: mod_base = OTHER; note = 2'-fluoro modified nucleotide
  modified_base 17: mod_base = OTHER; note = 2'-O-methyl modified nucleotide
  modified_base 18: mod_base = OTHER; note = 2'-O-methyl modified nucleotide
  modified_base 19: mod_base = OTHER; note = 2'-fluoro modified nucleotide
  modified_base 20: mod_base = OTHER; note = 2'-O-methyl modified nucleotide with phosphorothioate linkage
  modified_base 21: mod_base = OTHER; note = 2'-O-methyl modified nucleotide with phosphorothioate linkage
  modified_base 22: mod_base = OTHER; note = 2'-O-methyl modified nucleotide
ttgtccttgaagtcaagcttgg

SEQ ID NO: 889 - RNA, 22 nt, synthetic construct
  source 1..22: mol_type = other RNA
  modified_base 1: mod_base = OTHER; note = 4'-O-monomethylphosphonate-2'-O-methyl uridine phosphorothioate
  modified_base 2: mod_base = OTHER; note = 2'-fluoro modified nucleotide with phosphorothioate linkage
  modified_base 3: mod_base = OTHER; note = 2'-fluoro modified nucleotide
  modified_base 4: mod_base = OTHER; note = 2'-fluoro modified nucleotide
  modified_base 5: mod_base = OTHER; note = 2'-fluoro modified nucleotide
  modified_base 6: mod_base = OTHER; note = 2'-O-methyl modified nucleotide
  modified_base 7: mod_base = OTHER; note = 2'-fluoro modified nucleotide
  modified_base 8: mod_base = OTHER; note = 2'-O-methyl modified nucleotide
  modified_base 9: mod_base = OTHER; note = 2'-O-methyl modified nucleotide
  modified_base 10: mod_base = OTHER; note = 2'-fluoro modified nucleotide
  modified_base 11: mod_base = OTHER; note = 2'-O-methyl modified nucleotide
  modified_base 12: mod_base = OTHER; note = 2'-O-methyl modified nucleotide
  modified_base 13: mod_base = OTHER; note = 2'-O-methyl modified nucleotide
  modified_base 14: mod_base = OTHER; note = 2'-fluoro modified nucleotide
  modified_base 15: mod_base = OTHER; note = 2'-O-methyl modified nucleotide
  modified_base 16: mod_base = OTHER; note = 2'-fluoro modified nucleotide
  modified_base 17: mod_base = OTHER; note = 2'-O-methyl modified nucleotide
  modified_base 18: mod_base = OTHER; note = 2'-O-methyl modified nucleotide
  modified_base 19: mod_base = OTHER; note = 2'-fluoro modified nucleotide
  modified_base 20: mod_base = OTHER; note = 2'-O-methyl modified nucleotide with phosphorothioate linkage
  modified_base 21: mod_base = OTHER; note = 2'-O-methyl modified nucleotide with phosphorothioate linkage
  modified_base 22: mod_base = OTHER; note = 2'-O-methyl modified nucleotide
tgcttgtgggtttcaatcttgg

SEQ ID NO: 890 - RNA, 22 nt, synthetic construct
  source 1..22: mol_type = other RNA
  modified_base 1: mod_base = OTHER; note = 4'-O-monomethylphosphonate-2'-O-methyl uridine phosphorothioate
  modified_base 2: mod_base = OTHER; note = 2'-fluoro modified nucleotide with phosphorothioate linkage
  modified_base 3: mod_base = OTHER; note = 2'-fluoro modified nucleotide
  modified_base 4: mod_base = OTHER; note = 2'-fluoro modified nucleotide
  modified_base 5: mod_base = OTHER; note = 2'-fluoro modified nucleotide
  modified_base 6: mod_base = OTHER; note = 2'-O-methyl modified nucleotide
  modified_base 7: mod_base = OTHER; note = 2'-fluoro modified nucleotide
  modified_base 8: mod_base = OTHER; note = 2'-O-methyl modified nucleotide
  modified_base 9: mod_base = OTHER; note = 2'-O-methyl modified nucleotide
  modified_base 10: mod_base = OTHER; note = 2'-fluoro modified nucleotide
  modified_base 11: mod_base = OTHER; note = 2'-O-methyl modified nucleotide
  modified_base 12: mod_base = OTHER; note = 2'-O-methyl modified nucleotide
  modified_base 13: mod_base = OTHER; note = 2'-O-methyl modified nucleotide
  modified_base 14: mod_base = OTHER; note = 2'-fluoro modified nucleotide
  modified_base 15: mod_base = OTHER; note = 2'-O-methyl modified nucleotide
  modified_base 16: mod_base = OTHER; note = 2'-fluoro modified nucleotide
  modified_base 17: mod_base = OTHER; note = 2'-O-methyl modified nucleotide
  modified_base 18: mod_base = OTHER; note = 2'-O-methyl modified nucleotide
  modified_base 19: mod_base = OTHER; note = 2'-fluoro modified nucleotide
  modified_base 20: mod_base = OTHER; note = 2'-O-methyl modified nucleotide with phosphorothioate linkage
  modified_base 21: mod_base = OTHER; note = 2'-O-methyl modified nucleotide with phosphorothioate linkage
  modified_base 22: mod_base = OTHER; note = 2'-O-methyl modified nucleotide
tcagcttgtgggtttcaatcgg

SEQ ID NO: 891 - RNA, 22 nt, synthetic construct
  source 1..22: mol_type = other RNA
  modified_base 1: mod_base = OTHER; note = 4'-O-monomethylphosphonate-2'-O-methyl uridine phosphorothioate
  modified_base 2: mod_base = OTHER; note = 2'-fluoro modified nucleotide with phosphorothioate linkage
  modified_base 3: mod_base = OTHER; note = 2'-fluoro modified nucleotide with phosphorothioate linkage
  modified_base 4: mod_base = OTHER; note = 2'-fluoro modified nucleotide
  modified_base 5: mod_base = OTHER; note = 2'-fluoro modified nucleotide
  modified_base 6: mod_base = OTHER; note = 2'-O-methyl modified nucleotide
  modified_base 7: mod_base = OTHER; note = 2'-fluoro modified nucleotide
  modified_base 8: mod_base = OTHER; note = 2'-O-methyl modified nucleotide
  modified_base 9: mod_base = OTHER; note = 2'-O-methyl modified nucleotide
  modified_base 10: mod_base = OTHER; note = 2'-fluoro modified nucleotide
  modified_base 11: mod_base = OTHER; note = 2'-O-methyl modified nucleotide
  modified_base 12: mod_base = OTHER; note = 2'-O-methyl modified nucleotide
  modified_base 13: mod_base = OTHER; note = 2'-O-methyl modified nucleotide
  modified_base 14: mod_base = OTHER; note = 2'-fluoro modified nucleotide
  modified_base 15: mod_base = OTHER; note = 2'-O-methyl modified nucleotide
  modified_base 16: mod_base = OTHER; note = 2'-O-methyl modified nucleotide
  modified_base 17: mod_base = OTHER; note = 2'-O-methyl modified nucleotide
  modified_base 18: mod_base = OTHER; note = 2'-O-methyl modified nucleotide
  modified_base 19: mod_base = OTHER; note = 2'-O-methyl modified nucleotide
  modified_base 20: mod_base = OTHER; note = 2'-O-methyl modified nucleotide with phosphorothioate linkage
  modified_base 21: mod_base = OTHER; note = 2'-O-methyl modified nucleotide with phosphorothioate linkage
  modified_base 22: mod_base = OTHER; note = 2'-O-methyl modified nucleotide
tagcttgtgggtttcaatctgg

SEQ ID NO: 892 - RNA, 22 nt, synthetic construct
  source 1..22: mol_type = other RNA
  modified_base 1: mod_base = OTHER; note = 4'-O-monomethylphosphonate-2'-O-methyl uridine phosphorothioate
  modified_base 2: mod_base = OTHER; note = 2'-fluoro modified nucleotide with phosphorothioate linkage
  modified_base 3: mod_base = OTHER; note = 2'-fluoro modified nucleotide
  modified_base 4: mod_base = OTHER; note = 2'-fluoro modified nucleotide
  modified_base 5: mod_base = OTHER; note = 2'-fluoro modified nucleotide
  modified_base 6: mod_base = OTHER; note = 2'-O-methyl modified nucleotide
  modified_base 7: mod_base = OTHER; note = 2'-fluoro modified nucleotide
  modified_base 8: mod_base = OTHER; note = 2'-O-methyl modified nucleotide
  modified_base 9: mod_base = OTHER; note = 2'-O-methyl modified nucleotide
  modified_base 10: mod_base = OTHER; note = 2'-fluoro modified nucleotide
  modified_base 11: mod_base = OTHER; note = 2'-O-methyl modified nucleotide
  modified_base 12: mod_base = OTHER; note = 2'-O-methyl modified nucleotide
  modified_base 13: mod_base = OTHER; note = 2'-O-methyl modified nucleotide
  modified_base 14: mod_base = OTHER; note = 2'-fluoro modified nucleotide
  modified_base 15: mod_base = OTHER; note = 2'-O-methyl modified nucleotide
  modified_base 16: mod_base = OTHER; note = 2'-fluoro modified nucleotide
  modified_base 17: mod_base = OTHER; note = 2'-O-methyl modified nucleotide
  modified_base 18: mod_base = OTHER; note = 2'-O-methyl modified nucleotide
  modified_base 19: mod_base = OTHER; note = 2'-fluoro modified nucleotide
  modified_base 20: mod_base = OTHER; note = 2'-O-methyl modified nucleotide with phosphorothioate linkage
  modified_base 21: mod_base = OTHER; note = 2'-O-methyl modified nucleotide with phosphorothioate linkage
  modified_base 22: mod_base = OTHER; note = 2'-O-methyl modified nucleotide
ttctttgcttttactgaccagg

SEQ ID NO: 893 - RNA, 22 nt, synthetic construct
  source 1..22: mol_type = other RNA
  modified_base 1: mod_base = OTHER; note = 4'-O-monomethylphosphonate-2'-O-methyl uridine phosphorothioate
  modified_base 2: mod_base = OTHER; note = 2'-fluoro modified nucleotide with phosphorothioate linkage
  modified_base 3: mod_base = OTHER; note = 2'-fluoro modified nucleotide
  modified_base 4: mod_base = OTHER; note = 2'-fluoro modified nucleotide
  modified_base 5: mod_base = OTHER; note = 2'-fluoro modified nucleotide
  modified_base 6: mod_base = OTHER; note = 2'-O-methyl modified nucleotide
  modified_base 7: mod_base = OTHER; note = 2'-fluoro modified nucleotide
  modified_base 8: mod_base = OTHER; note = 2'-O-methyl modified nucleotide
  modified_base 9: mod_base = OTHER; note = 2'-O-methyl modified nucleotide
  modified_base 10: mod_base = OTHER; note = 2'-fluoro modified nucleotide
  modified_base 11: mod_base = OTHER; note = 2'-O-methyl modified nucleotide
  modified_base 12: mod_base = OTHER; note = 2'-O-methyl modified nucleotide
  modified_base 13: mod_base = OTHER; note = 2'-O-methyl modified nucleotide
  modified_base 14: mod_base = OTHER; note = 2'-fluoro modified nucleotide
  modified_base 15: mod_base = OTHER; note = 2'-O-methyl modified nucleotide
  modified_base 16: mod_base = OTHER; note = 2'-fluoro modified nucleotide
  modified_base 17: mod_base = OTHER; note = 2'-O-methyl modified nucleotide
  modified_base 18: mod_base = OTHER; note = 2'-O-methyl modified nucleotide
  modified_base 19: mod_base = OTHER; note = 2'-fluoro modified nucleotide
  modified_base 20: mod_base = OTHER; note = 2'-O-methyl modified nucleotide with phosphorothioate linkage
  modified_base 21: mod_base = OTHER; note = 2'-O-methyl modified nucleotide with phosphorothioate linkage
  modified_base 22: mod_base = OTHER; note = 2'-O-methyl modified nucleotide
tcttttttgtcatcgcttccgg

SEQ ID NO: 894 - RNA, 22 nt, synthetic construct
  source 1..22: mol_type = other RNA
  modified_base 1: mod_base = OTHER; note = 4'-O-monomethylphosphonate-2'-O-methyl uridine phosphorothioate
  modified_base 2: mod_base = OTHER; note = 2'-fluoro modified nucleotide with phosphorothioate linkage
  modified_base 3: mod_base = OTHER; note = 2'-fluoro modified nucleotide
  modified_base 4: mod_base = OTHER; note = 2'-fluoro modified nucleotide
  modified_base 5: mod_base = OTHER; note = 2'-fluoro modified nucleotide
  modified_base 6: mod_base = OTHER; note = 2'-O-methyl modified nucleotide
  modified_base 7: mod_base = OTHER; note = 2'-fluoro modified nucleotide
  modified_base 8: mod_base = OTHER; note = 2'-O-methyl modified nucleotide
  modified_base 9: mod_base = OTHER; note = 2'-O-methyl modified nucleotide
  modified_base 10: mod_base = OTHER; note = 2'-fluoro modified nucleotide
  modified_base 11: mod_base = OTHER; note = 2'-O-methyl modified nucleotide
  modified_base 12: mod_base = OTHER; note = 2'-O-methyl modified nucleotide
  modified_base 13: mod_base = OTHER; note = 2'-O-methyl modified nucleotide
  modified_base 14: mod_base = OTHER; note = 2'-fluoro modified nucleotide
  modified_base 15: mod_base = OTHER; note = 2'-O-methyl modified nucleotide
  modified_base 16: mod_base = OTHER; note = 2'-fluoro modified nucleotide
  modified_base 17: mod_base = OTHER; note = 2'-O-methyl modified nucleotide
  modified_base 18: mod_base = OTHER; note = 2'-O-methyl modified nucleotide
  modified_base 19: mod_base = OTHER; note = 2'-fluoro modified nucleotide
  modified_base 20: mod_base = OTHER; note = 2'-O-methyl modified nucleotide with phosphorothioate linkage
  modified_base 21: mod_base = OTHER; note = 2'-O-methyl modified nucleotide with phosphorothioate linkage
  modified_base 22: mod_base = OTHER; note = 2'-O-methyl modified nucleotide
ttcttcaggtctggcatggggg

SEQ ID NO: 895 - RNA, 22 nt, synthetic construct
  source 1..22: mol_type = other RNA
  modified_base 1: mod_base = OTHER; note = 4'-O-monomethylphosphonate-2'-O-methyl uridine phosphorothioate
  modified_base 2: mod_base = OTHER; note = 2'-fluoro modified nucleotide with phosphorothioate linkage
  modified_base 3: mod_base = OTHER; note = 2'-fluoro modified nucleotide
  modified_base 4: mod_base = OTHER; note = 2'-fluoro modified nucleotide
  modified_base 5: mod_base = OTHER; note = 2'-fluoro modified nucleotide
  modified_base 6: mod_base = OTHER; note = 2'-O-methyl modified nucleotide
  modified_base 7: mod_base = OTHER; note = 2'-fluoro modified nucleotide
  modified_base 8: mod_base = OTHER; note = 2'-O-methyl modified nucleotide
  modified_base 9: mod_base = OTHER; note = 2'-O-methyl modified nucleotide
  modified_base 10: mod_base = OTHER; note = 2'-fluoro modified nucleotide
  modified_base 11: mod_base = OTHER; note = 2'-O-methyl modified nucleotide
  modified_base 12: mod_base = OTHER; note = 2'-O-methyl modified nucleotide
  modified_base 13: mod_base = OTHER; note = 2'-O-methyl modified nucleotide
  modified_base 14: mod_base = OTHER; note = 2'-fluoro modified nucleotide
  modified_base 15: mod_base = OTHER; note = 2'-O-methyl modified nucleotide
  modified_base 16: mod_base = OTHER; note = 2'-fluoro modified nucleotide
  modified_base 17: mod_base = OTHER; note = 2'-O-methyl modified nucleotide
  modified_base 18: mod_base = OTHER; note = 2'-O-methyl modified nucleotide
  modified_base 19: mod_base = OTHER; note = 2'-fluoro modified nucleotide
  modified_base 20: mod_base = OTHER; note = 2'-O-methyl modified nucleotide with phosphorothioate linkage
  modified_base 21: mod_base = OTHER; note = 2'-O-methyl modified nucleotide with phosphorothioate linkage
  modified_base 22: mod_base = OTHER; note = 2'-O-methyl modified nucleotide
tctggtttgtagactatttggg

SEQ ID NO: 896 - RNA, 22 nt, synthetic construct
  source 1..22: mol_type = other RNA
  modified_base 1: mod_base = OTHER; note = 4'-O-monomethylphosphonate-2'-O-methyl uridine phosphorothioate
  modified_base 2: mod_base = OTHER; note = 2'-fluoro modified nucleotide with phosphorothioate linkage
  modified_base 3: mod_base = OTHER; note = 2'-fluoro modified nucleotide
  modified_base 4: mod_base = OTHER; note = 2'-fluoro modified nucleotide
  modified_base 5: mod_base = OTHER; note = 2'-fluoro modified nucleotide
  modified_base 6: mod_base = OTHER; note = 2'-O-methyl modified nucleotide
  modified_base 7: mod_base = OTHER; note = 2'-fluoro modified nucleotide
  modified_base 8: mod_base = OTHER; note = 2'-O-methyl modified nucleotide
  modified_base 9: mod_base = OTHER; note = 2'-O-methyl modified nucleotide
  modified_base 10: mod_base = OTHER; note = 2'-fluoro modified nucleotide
  modified_base 11: mod_base = OTHER; note = 2'-O-methyl modified nucleotide
  modified_base 12: mod_base = OTHER; note = 2'-O-methyl modified nucleotide
  modified_base 13: mod_base = OTHER; note = 2'-O-methyl modified nucleotide
  modified_base 14: mod_base = OTHER; note = 2'-fluoro modified nucleotide
  modified_base 15: mod_base = OTHER; note = 2'-O-methyl modified nucleotide
  modified_base 16: mod_base = OTHER; note = 2'-fluoro modified nucleotide
  modified_base 17: mod_base = OTHER; note = 2'-O-methyl modified nucleotide
  modified_base 18: mod_base = OTHER; note = 2'-O-methyl modified nucleotide
  modified_base 19: mod_base = OTHER; note = 2'-fluoro modified nucleotide
  modified_base 20: mod_base = OTHER; note = 2'-O-methyl modified nucleotide with phosphorothioate linkage
  modified_base 21: mod_base = OTHER; note = 2'-O-methyl modified nucleotide with phosphorothioate linkage
  modified_base 22: mod_base = OTHER; note = 2'-O-methyl modified nucleotide
ttcaggtcaactggtttgtagg

SEQ ID NO: 897 - RNA, 22 nt, synthetic construct
  source 1..22: mol_type = other RNA
  modified_base 1: mod_base = OTHER; note = 4'-O-monomethylphosphonate-2'-O-methyl uridine phosphorothioate
  modified_base 2: mod_base = OTHER; note = 2'-fluoro modified nucleotide with phosphorothioate linkage
  modified_base 3: mod_base = OTHER; note = 2'-fluoro modified nucleotide
  modified_base 4: mod_base = OTHER; note = 2'-fluoro modified nucleotide
  modified_base 5: mod_base = OTHER; note = 2'-fluoro modified nucleotide
  modified_base 6: mod_base = OTHER; note = 2'-O-methyl modified nucleotide
  modified_base 7: mod_base = OTHER; note = 2'-fluoro modified nucleotide
  modified_base 8: mod_base = OTHER; note = 2'-O-methyl modified nucleotide
  modified_base 9: mod_base = OTHER; note = 2'-O-methyl modified nucleotide
  modified_base 10: mod_base = OTHER; note = 2'-fluoro modified nucleotide
  modified_base 11: mod_base = OTHER; note = 2'-O-methyl modified nucleotide
  modified_base 12: mod_base = OTHER; note = 2'-O-methyl modified nucleotide
  modified_base 13: mod_base = OTHER; note = 2'-O-methyl modified nucleotide
  modified_base 14: mod_base = OTHER; note = 2'-fluoro modified nucleotide
  modified_base 15: mod_base = OTHER; note = 2'-O-methyl modified nucleotide
  modified_base 16: mod_base = OTHER; note = 2'-fluoro modified nucleotide
  modified_base 17: mod_base = OTHER; note = 2'-O-methyl modified nucleotide
  modified_base 18: mod_base = OTHER; note = 2'-O-methyl modified nucleotide
  modified_base 19: mod_base = OTHER; note = 2'-fluoro modified nucleotide
  modified_base 20: mod_base = OTHER; note = 2'-O-methyl modified nucleotide with phosphorothioate linkage
  modified_base 21: mod_base = OTHER; note = 2'-O-methyl modified nucleotide with phosphorothioate linkage
  modified_base 22: mod_base = OTHER; note = 2'-O-methyl modified nucleotide
tgctcaggtcaactggtttggg

SEQ ID NO: 898 - RNA, 22 nt, synthetic construct
  source 1..22: mol_type = other RNA
  modified_base 1: mod_base = OTHER; note = 4'-O-monomethylphosphonate-2'-O-methyl uridine phosphorothioate
  modified_base 2: mod_base = OTHER; note = 2'-fluoro modified nucleotide with phosphorothioate linkage
  modified_base 3: mod_base = OTHER; note = 2'-fluoro modified nucleotide
  modified_base 4: mod_base = OTHER; note = 2'-fluoro modified nucleotide
  modified_base 5: mod_base = OTHER; note = 2'-fluoro modified nucleotide
  modified_base 6: mod_base = OTHER; note = 2'-O-methyl modified nucleotide
  modified_base 7: mod_base = OTHER; note = 2'-fluoro modified nucleotide
  modified_base 8: mod_base = OTHER; note = 2'-O-methyl modified nucleotide
  modified_base 9: mod_base = OTHER; note = 2'-O-methyl modified nucleotide
  modified_base 10: mod_base = OTHER; note = 2'-fluoro modified nucleotide
  modified_base 11: mod_base = OTHER; note = 2'-O-methyl modified nucleotide
  modified_base 12: mod_base = OTHER; note = 2'-O-methyl modified nucleotide
  modified_base 13: mod_base = OTHER; note = 2'-O-methyl modified nucleotide
  modified_base 14: mod_base = OTHER; note = 2'-fluoro modified nucleotide
  modified_base 15: mod_base = OTHER; note = 2'-O-methyl modified nucleotide
  modified_base 16: mod_base = OTHER; note = 2'-fluoro modified nucleotide
  modified_base 17: mod_base = OTHER; note = 2'-O-methyl modified nucleotide
  modified_base 18: mod_base = OTHER; note = 2'-O-methyl modified nucleotide
  modified_base 19: mod_base = OTHER; note = 2'-fluoro modified nucleotide
  modified_base 20: mod_base = OTHER; note = 2'-O-methyl modified nucleotide with phosphorothioate linkage
  modified_base 21: mod_base = OTHER; note = 2'-O-methyl modified nucleotide with phosphorothioate linkage
  modified_base 22: mod_base = OTHER; note = 2'-O-methyl modified nucleotide
tcttgctcaggtcaactggtgg

SEQ ID NO: 899 - RNA, 22 nt, synthetic construct
  source 1..22: mol_type = other RNA
  modified_base 1: mod_base = OTHER; note = 4'-O-monomethylphosphonate-2'-O-methyl uridine phosphorothioate
  modified_base 2: mod_base = OTHER; note = 2'-fluoro modified nucleotide with phosphorothioate linkage
  modified_base 3: mod_base = OTHER; note = 2'-fluoro modified nucleotide
  modified_base 4: mod_base = OTHER; note = 2'-fluoro modified nucleotide
  modified_base 5: mod_base = OTHER; note = 2'-fluoro modified nucleotide
  modified_base 6: mod_base = OTHER; note = 2'-O-methyl modified nucleotide
  modified_base 7: mod_base = OTHER; note = 2'-fluoro modified nucleotide
  modified_base 8: mod_base = OTHER; note = 2'-O-methyl modified nucleotide
  modified_base 9: mod_base = OTHER; note = 2'-O-methyl modified nucleotide
  modified_base 10: mod_base = OTHER; note = 2'-fluoro modified nucleotide
  modified_base 11: mod_base = OTHER; note = 2'-O-methyl modified nucleotide
  modified_base 12: mod_base = OTHER; note = 2'-O-methyl modified nucleotide
  modified_base 13: mod_base = OTHER; note = 2'-O-methyl modified nucleotide
  modified_base 14: mod_base = OTHER; note = 2'-fluoro modified nucleotide
  modified_base 15: mod_base = OTHER; note = 2'-O-methyl modified nucleotide
  modified_base 16: mod_base = OTHER; note = 2'-fluoro modified nucleotide
  modified_base 17: mod_base = OTHER; note = 2'-O-methyl modified nucleotide
  modified_base 18: mod_base = OTHER; note = 2'-O-methyl modified nucleotide
  modified_base 19: mod_base = OTHER; note = 2'-fluoro modified nucleotide
  modified_base 20: mod_base = OTHER; note = 2'-O-methyl modified nucleotide with phosphorothioate linkage
  modified_base 21: mod_base = OTHER; note = 2'-O-methyl modified nucleotide with phosphorothioate linkage
  modified_base 22: mod_base = OTHER; note = 2'-O-methyl modified nucleotide
tacacttggaggtcaccttggg

SEQ ID NO: 900 - RNA, 22 nt, synthetic construct
  source 1..22: mol_type = other RNA
  modified_base 1: mod_base = OTHER; note = 4'-O-monomethylphosphonate-2'-O-methyl uridine phosphorothioate
  modified_base 2: mod_base = OTHER; note = 2'-fluoro modified nucleotide with phosphorothioate linkage
  modified_base 3: mod_base = OTHER; note = 2'-fluoro modified nucleotide
  modified_base 4: mod_base = OTHER; note = 2'-fluoro modified nucleotide
  modified_base 5: mod_base = OTHER; note = 2'-fluoro modified nucleotide
  modified_base 6: mod_base = OTHER; note = 2'-O-methyl modified nucleotide
  modified_base 7: mod_base = OTHER; note = 2'-fluoro modified nucleotide
  modified_base 8: mod_base = OTHER; note = 2'-O-methyl modified nucleotide
  modified_base 9: mod_base = OTHER; note = 2'-O-methyl modified nucleotide
  modified_base 10: mod_base = OTHER; note = 2'-fluoro modified nucleotide
  modified_base 11: mod_base = OTHER; note = 2'-O-methyl modified nucleotide
  modified_base 12: mod_base = OTHER; note = 2'-O-methyl modified nucleotide
  modified_base 13: mod_base = OTHER; note = 2'-O-methyl modified nucleotide
  modified_base 14: mod_base = OTHER; note = 2'-fluoro modified nucleotide
  modified_base 15: mod_base = OTHER; note = 2'-O-methyl modified nucleotide
  modified_base 16: mod_base = OTHER; note = 2'-fluoro modified nucleotide
  modified_base 17: mod_base = OTHER; note = 2'-O-methyl modified nucleotide
  modified_base 18: mod_base = OTHER; note = 2'-O-methyl modified nucleotide
  modified_base 19: mod_base = OTHER; note = 2'-fluoro modified nucleotide
  modified_base 20: mod_base = OTHER; note = 2'-O-methyl modified nucleotide with phosphorothioate linkage
  modified_base 21: mod_base = OTHER; note = 2'-O-methyl modified nucleotide with phosphorothioate linkage
  modified_base 22: mod_base = OTHER; note = 2'-O-methyl modified nucleotide
ttccttgaagtcaagcttctgg

SEQ ID NO: 901 - RNA, 22 nt, synthetic construct
  source 1..22: mol_type = other RNA
  modified_base 1: mod_base = OTHER; note = 4'-O-monomethylphosphonate-2'-O-methyl uridine phosphorothioate
  modified_base 2: mod_base = OTHER; note = 2'-fluoro modified nucleotide with phosphorothioate linkage
  modified_base 3: mod_base = OTHER; note = 2'-fluoro modified nucleotide
  modified_base 4: mod_base = OTHER; note = 2'-fluoro modified nucleotide
  modified_base 5: mod_base = OTHER; note = 2'-fluoro modified nucleotide
  modified_base 6: mod_base = OTHER; note = 2'-O-methyl modified nucleotide
  modified_base 7: mod_base = OTHER; note = 2'-fluoro modified nucleotide
  modified_base 8: mod_base = OTHER; note = 2'-O-methyl modified nucleotide
  modified_base 9: mod_base = OTHER; note = 2'-O-methyl modified nucleotide
  modified_base 10: mod_base = OTHER; note = 2'-fluoro modified nucleotide
  modified_base 11: mod_base = OTHER; note = 2'-O-methyl modified nucleotide
  modified_base 12: mod_base = OTHER; note = 2'-O-methyl modified nucleotide
  modified_base 13: mod_base = OTHER; note = 2'-O-methyl modified nucleotide
  modified_base 14: mod_base = OTHER; note = 2'-fluoro modified nucleotide
  modified_base 15: mod_base = OTHER; note = 2'-O-methyl modified nucleotide
  modified_base 16: mod_base = OTHER; note = 2'-fluoro modified nucleotide
  modified_base 17: mod_base = OTHER; note = 2'-O-methyl modified nucleotide
  modified_base 18: mod_base = OTHER; note = 2'-O-methyl modified nucleotide
  modified_base 19: mod_base = OTHER; note = 2'-fluoro modified nucleotide
  modified_base 20: mod_base = OTHER; note = 2'-O-methyl modified nucleotide with phosphorothioate linkage
  modified_base 21: mod_base = OTHER; note = 2'-O-methyl modified nucleotide with phosphorothioate linkage
  modified_base 22: mod_base = OTHER; note = 2'-O-methyl modified nucleotide
tctgtccttgaagtcaagctgg

SEQ ID NO: 902 - RNA, 22 nt, synthetic construct
  source 1..22: mol_type = other RNA
  modified_base 1: mod_base = OTHER; note = 4'-O-monomethylphosphonate-2'-O-methyl uridine phosphorothioate
  modified_base 2: mod_base = OTHER; note = 2'-fluoro modified nucleotide with phosphorothioate linkage
  modified_base 3: mod_base = OTHER; note = 2'-fluoro modified nucleotide
  modified_base 4: mod_base = OTHER; note = 2'-fluoro modified nucleotide
  modified_base 5: mod_base = OTHER; note = 2'-fluoro modified nucleotide
  modified_base 6: mod_base = OTHER; note = 2'-O-methyl modified nucleotide
  modified_base 7: mod_base = OTHER; note = 2'-fluoro modified nucleotide
  modified_base 8: mod_base = OTHER; note = 2'-O-methyl modified nucleotide
  modified_base 9: mod_base = OTHER; note = 2'-O-methyl modified nucleotide
  modified_base 10: mod_base = OTHER; note = 2'-fluoro modified nucleotide
  modified_base 11: mod_base = OTHER; note = 2'-O-methyl modified nucleotide
  modified_base 12: mod_base = OTHER; note = 2'-O-methyl modified nucleotide
  modified_base 13: mod_base = OTHER; note = 2'-O-methyl modified nucleotide
  modified_base 14: mod_base = OTHER; note = 2'-fluoro modified nucleotide
  modified_base 15: mod_base = OTHER; note = 2'-O-methyl modified nucleotide
  modified_base 16: mod_base = OTHER; note = 2'-fluoro modified nucleotide
  modified_base 17: mod_base = OTHER; note = 2'-O-methyl modified nucleotide
  modified_base 18: mod_base = OTHER; note = 2'-O-methyl modified nucleotide
  modified_base 19: mod_base = OTHER; note = 2'-fluoro modified nucleotide
  modified_base 20: mod_base = OTHER; note = 2'-O-methyl modified nucleotide with phosphorothioate linkage
  modified_base 21: mod_base = OTHER; note = 2'-O-methyl modified nucleotide with phosphorothioate linkage
  modified_base 22: mod_base = OTHER; note = 2'-O-methyl modified nucleotide
tactctgtccttgaagtcaagg

SEQ ID NO: 903 - RNA, 22 nt, synthetic construct
  source 1..22: mol_type = other RNA
  modified_base 1: mod_base = OTHER; note = 4'-O-monomethylphosphonate-2'-O-methyl uridine phosphorothioate
  modified_base 2: mod_base = OTHER; note = 2'-fluoro modified nucleotide with phosphorothioate linkage
  modified_base 3: mod_base = OTHER; note = 2'-fluoro modified nucleotide
  modified_base 4: mod_base = OTHER; note = 2'-fluoro modified nucleotide
  modified_base 5: mod_base = OTHER; note = 2'-fluoro modified nucleotide
  modified_base 6: mod_base = OTHER; note = 2'-O-methyl modified nucleotide
  modified_base 7: mod_base = OTHER; note = 2'-fluoro modified nucleotide
  modified_base 8: mod_base = OTHER; note = 2'-O-methyl modified nucleotide
  modified_base 9: mod_base = OTHER; note = 2'-O-methyl modified nucleotide
  modified_base 10: mod_base = OTHER; note = 2'-fluoro modified nucleotide
  modified_base 11: mod_base = OTHER; note = 2'-O-methyl modified nucleotide
  modified_base 12: mod_base = OTHER; note = 2'-O-methyl modified nucleotide
  modified_base 13: mod_base = OTHER; note = 2'-O-methyl modified nucleotide
  modified_base 14: mod_base = OTHER; note = 2'-fluoro modified nucleotide
  modified_base 15: mod_base = OTHER; note = 2'-O-methyl modified nucleotide
  modified_base 16: mod_base = OTHER; note = 2'-fluoro modified nucleotide
  modified_base 17: mod_base = OTHER; note = 2'-O-methyl modified nucleotide
  modified_base 18: mod_base = OTHER; note = 2'-O-methyl modified nucleotide
  modified_base 19: mod_base = OTHER; note = 2'-fluoro modified nucleotide
  modified_base 20: mod_base = OTHER; note = 2'-O-methyl modified nucleotide with phosphorothioate linkage
  modified_base 21: mod_base = OTHER; note = 2'-O-methyl modified nucleotide with phosphorothioate linkage
  modified_base 22: mod_base = OTHER; note = 2'-O-methyl modified nucleotide
tttcaatctttttatttcctgg

SEQ ID NO: 904 - RNA, 22 nt, synthetic construct
  source 1..22: mol_type = other RNA
  modified_base 1: mod_base = OTHER; note = 4'-O-monomethylphosphonate-2'-O-methyl uridine phosphorothioate
  modified_base 2: mod_base = OTHER; note = 2'-fluoro modified nucleotide with phosphorothioate linkage
  modified_base 3: mod_base = OTHER; note = 2'-fluoro modified nucleotide
  modified_base 4: mod_base = OTHER; note = 2'-fluoro modified nucleotide
  modified_base 5: mod_base = OTHER; note = 2'-fluoro modified nucleotide
  modified_base 6: mod_base = OTHER; note = 2'-O-methyl modified nucleotide
  modified_base 7: mod_base = OTHER; note = 2'-fluoro modified nucleotide
  modified_base 8: mod_base = OTHER; note = 2'-O-methyl modified nucleotide
  modified_base 9: mod_base = OTHER; note = 2'-O-methyl modified nucleotide
  modified_base 10: mod_base = OTHER; note = 2'-fluoro modified nucleotide
  modified_base 11: mod_base = OTHER; note = 2'-O-methyl modified nucleotide
  modified_base 12: mod_base = OTHER; note = 2'-O-methyl modified nucleotide
  modified_base 13: mod_base = OTHER; note = 2'-O-methyl modified nucleotide
  modified_base 14: mod_base = OTHER; note = 2'-fluoro modified nucleotide
  modified_base 15: mod_base = OTHER; note = 2'-O-methyl modified nucleotide
  modified_base 16: mod_base = OTHER; note = 2'-fluoro modified nucleotide
  modified_base 17: mod_base = OTHER; note = 2'-O-methyl modified nucleotide
  modified_base 18: mod_base = OTHER; note = 2'-O-methyl modified nucleotide
  modified_base 19: mod_base = OTHER; note = 2'-fluoro modified nucleotide
  modified_base 20: mod_base = OTHER; note = 2'-O-methyl modified nucleotide with phosphorothioate linkage
  modified_base 21: mod_base = OTHER; note = 2'-O-methyl modified nucleotide with phosphorothioate linkage
  modified_base 22: mod_base = OTHER; note = 2'-O-methyl modified nucleotide
ttttcaatctttttatttccgg

SEQ ID NO: 905 - RNA, 22 nt, synthetic construct
  source 1..22: mol_type = other RNA
  modified_base 1: mod_base = OTHER; note = 4'-O-monomethylphosphonate-2'-O-methyl uridine phosphorothioate
  modified_base 2: mod_base = OTHER; note = 2'-fluoro modified nucleotide with phosphorothioate linkage
  modified_base 3: mod_base = OTHER; note = 2'-fluoro modified nucleotide
  modified_base 4: mod_base = OTHER; note = 2'-fluoro modified nucleotide
  modified_base 5: mod_base = OTHER; note = 2'-fluoro modified nucleotide
  modified_base 6: mod_base = OTHER; note = 2'-O-methyl modified nucleotide
  modified_base 7: mod_base = OTHER; note = 2'-fluoro modified nucleotide
  modified_base 8: mod_base = OTHER; note = 2'-O-methyl modified nucleotide
  modified_base 9: mod_base = OTHER; note = 2'-O-methyl modified nucleotide
  modified_base 10: mod_base = OTHER; note = 2'-fluoro modified nucleotide
  modified_base 11: mod_base = OTHER; note = 2'-O-methyl modified nucleotide
  modified_base 12: mod_base = OTHER; note = 2'-O-methyl modified nucleotide
  modified_base 13: mod_base = OTHER; note = 2'-O-methyl modified nucleotide
  modified_base 14: mod_base = OTHER; note = 2'-fluoro modified nucleotide
  modified_base 15: mod_base = OTHER; note = 2'-O-methyl modified nucleotide
  modified_base 16: mod_base = OTHER; note = 2'-fluoro modified nucleotide
  modified_base 17: mod_base = OTHER; note = 2'-O-methyl modified nucleotide
  modified_base 18: mod_base = OTHER; note = 2'-O-methyl modified nucleotide
  modified_base 19: mod_base = OTHER; note = 2'-fluoro modified nucleotide
  modified_base 20: mod_base = OTHER; note = 2'-O-methyl modified nucleotide with phosphorothioate linkage
  modified_base 21: mod_base = OTHER; note = 2'-O-methyl modified nucleotide with phosphorothioate linkage
  modified_base 22: mod_base = OTHER; note = 2'-O-methyl modified nucleotide
tgtttcaatctttttatttcgg

SEQ ID NO: 906 - RNA, 22 nt, synthetic construct
  source 1..22: mol_type = other RNA
  modified_base 1: mod_base = OTHER; note = 4'-O-monomethylphosphonate-2'-O-methyl uridine phosphorothioate
  modified_base 2: mod_base = OTHER; note = 2'-fluoro modified nucleotide with phosphorothioate linkage
  modified_base 3: mod_base = OTHER; note = 2'-fluoro modified nucleotide
  modified_base 4: mod_base = OTHER; note = 2'-fluoro modified nucleotide
  modified_base 5: mod_base = OTHER; note = 2'-fluoro modified nucleotide
  modified_base 6: mod_base = OTHER; note = 2'-O-methyl modified nucleotide
  modified_base 7: mod_base = OTHER; note = 2'-fluoro modified nucleotide
  modified_base 8: mod_base = OTHER; note = 2'-O-methyl modified nucleotide
  modified_base 9: mod_base = OTHER; note = 2'-O-methyl modified nucleotide
  modified_base 10: mod_base = OTHER; note = 2'-fluoro modified nucleotide
  modified_base 11: mod_base = OTHER; note = 2'-O-methyl modified nucleotide
  modified_base 12: mod_base = OTHER; note = 2'-O-methyl modified nucleotide
  modified_base 13: mod_base = OTHER; note = 2'-O-methyl modified nucleotide
  modified_base 14: mod_base = OTHER; note = 2'-fluoro modified nucleotide
  modified_base 15: mod_base = OTHER; note = 2'-O-methyl modified nucleotide
  modified_base 16: mod_base = OTHER; note = 2'-fluoro modified nucleotide
  modified_base 17: mod_base = OTHER; note = 2'-O-methyl modified nucleotide
  modified_base 18: mod_base = OTHER; note = 2'-O-methyl modified nucleotide
  modified_base 19: mod_base = OTHER; note = 2'-fluoro modified nucleotide
  modified_base 20: mod_base = OTHER; note = 2'-O-methyl modified nucleotide with phosphorothioate linkage
  modified_base 21: mod_base = OTHER; note = 2'-O-methyl modified nucleotide with phosphorothioate linkage
  modified_base 22: mod_base = OTHER; note = 2'-O-methyl modified nucleotide
tggtttcaatctttttatttgg

SEQ ID NO: 907 - RNA, 22 nt, synthetic construct
  source 1..22: mol_type = other RNA
  modified_base 1: mod_base = OTHER; note = 4'-O-monomethylphosphonate-2'-O-methyl uridine phosphorothioate
  modified_base 2: mod_base = OTHER; note = 2'-fluoro modified nucleotide with phosphorothioate linkage
  modified_base 3: mod_base = OTHER; note = 2'-fluoro modified nucleotide
  modified_base 4: mod_base = OTHER; note = 2'-fluoro modified nucleotide
  modified_base 5: mod_base = OTHER; note = 2'-fluoro modified nucleotide
  modified_base 6: mod_base = OTHER; note = 2'-O-methyl modified nucleotide
  modified_base 7: mod_base = OTHER; note = 2'-fluoro modified nucleotide
  modified_base 8: mod_base = OTHER; note = 2'-O-methyl modified nucleotide
  modified_base 9: mod_base = OTHER; note = 2'-O-methyl modified nucleotide
  modified_base 10: mod_base = OTHER; note = 2'-fluoro modified nucleotide
  modified_base 11: mod_base = OTHER; note = 2'-O-methyl modified nucleotide
  modified_base 12: mod_base = OTHER; note = 2'-O-methyl modified nucleotide
  modified_base 13: mod_base = OTHER; note = 2'-O-methyl modified nucleotide
  modified_base 14: mod_base = OTHER; note = 2'-fluoro modified nucleotide
  modified_base 15: mod_base = OTHER; note = 2'-O-methyl modified nucleotide
  modified_base 16: mod_base = OTHER; note = 2'-fluoro modified nucleotide
  modified_base 17: mod_base = OTHER; note = 2'-O-methyl modified nucleotide
  modified_base 18: mod_base = OTHER; note = 2'-O-methyl modified nucleotide
  modified_base 19: mod_base = OTHER; note = 2'-fluoro modified nucleotide
  modified_base 20: mod_base = OTHER; note = 2'-O-methyl modified nucleotide with phosphorothioate linkage
  modified_base 21: mod_base = OTHER; note = 2'-O-methyl modified nucleotide with phosphorothioate linkage
  modified_base 22: mod_base = OTHER; note = 2'-O-methyl modified nucleotide
tgggtttcaatctttttattgg

SEQ ID NO: 908 - RNA, 22 nt, synthetic construct
  source 1..22: mol_type = other RNA
  modified_base 1: mod_base = OTHER; note = 4'-O-monomethylphosphonate-2'-O-methyl uridine phosphorothioate
  modified_base 2: mod_base = OTHER; note = 2'-fluoro modified nucleotide with phosphorothioate linkage
  modified_base 3: mod_base = OTHER; note = 2'-fluoro modified nucleotide
  modified_base 4: mod_base = OTHER; note = 2'-fluoro modified nucleotide
  modified_base 5: mod_base = OTHER; note = 2'-fluoro modified nucleotide
  modified_base 6: mod_base = OTHER; note = 2'-O-methyl modified nucleotide
  modified_base 7: mod_base = OTHER; note = 2'-fluoro modified nucleotide
  modified_base 8: mod_base = OTHER; note = 2'-O-methyl modified nucleotide
  modified_base 9: mod_base = OTHER; note = 2'-O-methyl modified nucleotide
  modified_base 10: mod_base = OTHER; note = 2'-fluoro modified nucleotide
  modified_base 11: mod_base = OTHER; note = 2'-O-methyl modified nucleotide
  modified_base 12: mod_base = OTHER; note = 2'-O-methyl modified nucleotide
  modified_base 13: mod_base = OTHER; note = 2'-O-methyl modified nucleotide
  modified_base 14: mod_base = OTHER; note = 2'-fluoro modified nucleotide
  modified_base 15: mod_base = OTHER; note = 2'-O-methyl modified nucleotide
  modified_base 16: mod_base = OTHER; note = 2'-fluoro modified nucleotide
  modified_base 17: mod_base = OTHER; note = 2'-O-methyl modified nucleotide
  modified_base 18: mod_base = OTHER; note = 2'-O-methyl modified nucleotide
  modified_base 19: mod_base = OTHER; note = 2'-fluoro modified nucleotide
  modified_base 20: mod_base = OTHER; note = 2'-O-methyl modified nucleotide with phosphorothioate linkage
  modified_base 21: mod_base = OTHER; note = 2'-O-methyl modified nucleotide with phosphorothioate linkage
  modified_base 22: mod_base = OTHER; note = 2'-O-methyl modified nucleotide
ttgggtttcaatctttttatgg

SEQ ID NO: 909 - DNA, 2331 bp, Homo sapiens
  source 1..2331: mol_type = genomic DNA
atggctgagccccgccaggagttcgaagtgatggaagatcacgctgggacgtacgggttgggggacaggaaagatcaggggggctacaccatgcaccaagaccaagagggtgacacggacgctggcctgaaagaatctcccctgcagacccccactgaggacggatctgaggaaccgggctctgaaacctctgatgctaagagcactccaacagcggaagatgtgacagcacccttagtggatgagggagctcccggcaagcaggctgccgcgcagccccacacggagatcccagaaggaaccacagctgaagaagcaggcattggagacacccccagcctggaagacgaagctgctggtcacgtgacccaagagcctgaaagtggtaaggtggtccaggaaggcttcctccgagagccaggccccccaggtctgagccaccagctcatgtccggcatgcctggggctcccctcctgcctgagggccccagagaggccacacgccaaccttcggggacaggacctgaggacacagagggcggccgccacgcccctgagctgctcaagcaccagcttctaggagacctgcaccaggaggggccgccgctgaagggggcagggggcaaagagaggccggggagcaaggaggaggtggatgaagaccgcgacgtcgatgagtcctccccccaagactcccctccctccaaggcctccccagcccaagatgggcggcctccccagacagccgccagagaagccaccagcatcccaggcttcccagcggagggtgccatccccctccctgtggatttcctctccaaagtttccacagagatcccagcctcagagcccgacgggcccagtgtagggcgggccaaagggcaggatgcccccctggagttcacgtttcacgtggaaatcacacccaacgtgcagaaggagcaggcgcactcggaggagcatttgggaagggctgcatttccaggggcccctggagaggggccagaggcccggggcccctctttgggagaggacacaaaagaggctgaccttccagagccctctgaaaagcagcctgctgctgctccgcgggggaagcccgtcagccgggtccctcaactcaaagctcgcatggtcagtaaaagcaaagacgggactggaagcgatgacaaaaaagccaagacatccacacgttcctctgctaaaaccttgaaaaataggccttgccttagccccaaacaccccactcctggtagctcagaccctctgatccaaccctccagccctgctgtgtgcccagagccaccttcctctcctaaatacgtctcttctgtcacttcccgaactggcagttctggagcaaaggagatgaaactcaagggggctgatggtaaaacgaagatcgccacaccgcggggagcagcccctccaggccagaagggccaggccaacgccaccaggattccagcaaaaaccccgcccgctccaaagacaccacccagctctgcgactaagcaagtccagagaagaccaccccctgcagggcccagatctgagagaggtgaacctccaaaatcaggggatcgcagcggctacagcagccccggctccccaggcactcccggcagccgctcccgcaccccgtcccttccaaccccacccacccgggagcccaagaaggtggcagtggtccgtactccacccaagtcgccgtcttccgccaagagccgcctgcagacagcccccgtgcccatgccagacctgaagaatgtcaagtccaagatcggctccactgagaacctgaagcaccagccgggaggcgggaaggtgcagataattaataagaagctggatcttagcaacgtccagtccaagtgtggctcaaaggataatatcaaacacgtcccgggaggcggcagtgtgcaaatagtctacaaaccagttgacctgagcaaggtgacctccaagtgtggctcattaggcaacatccatcataaaccaggaggtggccaggtggaagtaaaatctgagaagcttgacttcaaggacagagtccagtcgaagattgggtccctggacaatatcacccacgtccctggcggaggaaataaaaagattgaaacccacaagctgaccttccgcgagaacgccaaagccaagacagaccacggggcggagatcgtgtacaagtcgccagtggtgtctggggacacgtctccacggcatctcagcaatgtctcctccaccggcagcatcgacatggtagactcgccccagctcgccacgctagctgacgaggtgtctgcctccctggccaagcagggtttgtga

SEQ ID NO: 910 - DNA, 1293 bp, Mus musculus
  source 1..1293: mol_type = genomic DNA
atggctgaccctcgccaggagtttgacacaatggaagaccatgctggagattacactctgctccaagaccaagaaggagacatggaccatggcttaaaagagtctcccccacagccccccgccgatgatggagcggaggaaccagggtcggagacctccgatgctaagagcactccaactgctgaagacgtgactgcgcccctagtggatgagagagctcccgacaagcaggccgctgcccagccccacacggagatcccagaaggaattacagccgaagaagcaggcatcggagacaccccgaaccaggaggaccaagccgctgggcatgtgactcaagctcgtgtggccagcaaagacaggacaggaaatgacgagaagaaagccaagggcgctgatggcaaaaccggggcgaagatcgccacacctcggggagcagcctctccggcccagaagggcacgtccaacgccaccaggatcccggccaagaccacgcccagccctaagactcctccagggtcaggtgaaccaccaaaatccggagaacgaagcggctacagcagccccggctctcccggaacgcctggcagtcgctcgcgcaccccatccctaccaacaccgcccacccgggagcccaagaaggtggcagtggtccgcactccccctaagtcaccatcagctagtaagagccgcctgcagactgcccctgtgcccatgccagacctaaagaatgtcaggtcgaagattggctctactgagaacctgaagcaccagccaggaggtggcaaggtgcagataattaataagaagctggatcttagcaacgtccagtccaagtgtggctcgaaggataatatcaaacacgtcccgggtggaggcagtgtgcaaatagtctacaagccggtggacctgagcaaagtgacctccaagtgtggctcgttagggaacatccatcacaagccaggaggtggccaggtggaagtaaaatcagagaagctggacttcaaggacagagtccagtcgaagattggctccttggataatatcacccacgtccctggaggagggaataagaagattgaaacccacaagctgaccttcagggagaatgccaaagccaagacagaccatggagcagaaattgtgtataagtcacccgtggtgtctggggacacatctccacggcacctcagcaatgtgtcttccacgggcagcatcgacatggtggactcaccacagcttgccacactagccgatgaagtgtctgcttccttggccaagcagggtttgtga

SEQ ID NO: 911 - DNA, 2556 bp, Macaca fascicularis
  source 1..2556: mol_type = genomic DNA
atggctgagccccgccaggagttcgatgtgatggaagatcacgctgggacgtacgggttgggggacaggaaagatcaagagggctacaccatgctccaagaccaagagggtgacacggacgctggcctgaaagaatctcccctgcagacccccgctgaggatggatctgaggaactgggctctgaaacctctgatgctaagagcactccaacggcggaagctgaggaagcaggcatcggagacacccccagcctggaagacgaagctgctggtcacgtgacccaagaggagttgagagttccgggccagcagaggaaggcacctgaaaggcccctggccaatgagattagtgctcacgtccagcctggaccctgcaaagaggcctctggggtctctgggctgtgcatgggggagaaagagccagaagctcccatcccactgaccgcgagccttcctcagcaccgtcccatttgctcagcgcctcctccaacaggaggccctcgagagccctcccaggagtggggacgaaaaggtggggactgggccgagaagggtccgacctttccgaagtccgccacccctgcgtatctccacacagagcctgaaagtggtaaggtggtccaggaagtcttcctcggagagccaggccccccaggtctgagccaccagctcgtgtccagcatgcctggggctcccctcctgcctgagggccccagagaggccacacgccagccttcagggacaggacctgaggacacagagggtggccaacacgcccctgagctgctcaagcaccagcttctgggagacctgcaccaggaggggccgccactgaagggagccgggggcaaagagaggctggggagcaaggaggaggtggatgaagaccgcgacgtcgatgagtcctccccgcaagactcccctccatccagggtctccccagtccaagatgggcagcctccccagacagccgccagagaagccaccagcgtcccaggcttcccagcggagggtgccattgccctccctgtggatttcctctccagagtttccacagagatcccagcctctgagcccgaggggcccagtgcagggtgggctgaagggcaggacatgccccctgagttcacgttccacgtggaaatcacacccaacgtgcagaaggagcaggcgcacccggaggaggattcgggaagggctgcatttccaggggctcctggagaggagccagaggcccggggcccctctttgggagaggacacaaaagaggctgagcttccagagcccactgaaaagcagcctgctgctgctccgcggggaaaacccgtcagccgggtccctcaactcaaagctcgcatggtcagtaaaagcaaagacgggactggaagcgatgacaaaaaagccaagacatccacacgttcctctgctaaaaccttgaaaaataggccttgccttagccccaaacaccccactcctggtagctcagaccctctgatccaaccctccagccctgccgtgtgcccagagccaccttcctctcctaaatacgtctcttctgtcactccccgaactggcagttctggagcaaaggagatgaaactcaagggggctgatgggaaaacgaagatcgccacaccccggggagcggcccctccaggccagaagggccaagccaacgccaccaggattccagcaaaaaccccgcccgccccaaagacaccacccagctctgcgaccaagcaagtgcagagaaaaccaccccctgcagagcccacatctgagagaggtgaacctccaaaatcaggggatcgcagtggctacagcagccccggctccccgggcactcccggcagccgctcccgcaccccgtcccttccaacccctccagcccgggagcccaagaaggtggcggtggtccgtactccacctaagtcgccgtcttccgccaagagccgcctgcagacagcccccgtgcccatgccagacctgaagaacgtcaagtccaagatcggctccaccgagaacctgaagcaccagccgggaggcgggaaggtgcagataattaataagaagctggatcttagcaacgtccagtccaagtgtggctcaaaggataatatcaaacacgtcccgggaggcggcagtgtgcaaatagtctacaaaccagttgacctgagcaaggtgacctccaagtgtggctcattaggcaacatccatcataaaccaggaggtggccaggtggaagtaaaatctgagaagctggacttcaaggacagagtgcagtcgaagatcgggtccctggacaatatcacccatgtccctggcggaggaaataaaaagattgaaacccacaagctgaccttccgcgagaacgccaaagccaagacagaccacggggcggaaatcgtgtacaagtcgccggtggtgtctggggacacgtctccacggcacctcagcaatgtctcctccaccggcagcatcgacatggtagactcgccccagctcgccacgctagccgacgaggtgtctgcctccctggccaagcagggtttgtga

SEQ ID NO: 912 - RNA, 19 nt, synthetic construct
  source 1..19: mol_type = other RNA
gagaacctgaagcaccagc

SEQ ID NO: 913 - RNA, 19 nt, synthetic construct
  source 1..19: mol_type = other RNA
agaacctgaagcaccagcc

SEQ ID NO: 914 - RNA, 19 nt, synthetic construct
  source 1..19: mol_type = other RNA
gtgacctccaagtgtggct

SEQ ID NO: 915 - RNA, 19 nt, synthetic construct
  source 1..19: mol_type = other RNA
aggaggtggccaggtggaa

SEQ ID NO: 916 - RNA, 19 nt, synthetic construct
  source 1..19: mol_type = other RNA
gaggtggccaggtggaagt

SEQ ID NO: 917 - RNA, 19 nt, synthetic construct
  source 1..19: mol_type = other RNA
aggtggccaggtggaagta

SEQ ID NO: 918 - RNA, 19 nt, synthetic construct
  source 1..19: mol_type = other RNA
ggtggccaggtggaagtaa

SEQ ID NO: 919 - RNA, 19 nt, synthetic construct
  source 1..19: mol_type = other RNA
gtggccaggtggaagtaaa

SEQ ID NO: 920 - RNA, 19 nt, synthetic construct
  source 1..19: mol_type = other RNA
tggccaggtggaagtaaaa

SEQ ID NO: 921 - RNA, 19 nt, synthetic construct
  source 1..19: mol_type = other RNA
ggccaggtggaagtaaaat

SEQ ID NO: 922 - RNA, 19 nt, synthetic construct
  source 1..19: mol_type = other RNA
gccaggtggaagtaaaatc

SEQ ID NO: 923 - RNA, 19 nt, synthetic construct
  source 1..19: mol_type = other RNA
aagattgaaacccacaagc

SEQ ID NO: 924 - RNA, 19 nt, synthetic construct
  source 1..19: mol_type = other RNA
agattgaaacccacaagct

SEQ ID NO: 925 - RNA, 19 nt, synthetic construct
  source 1..19: mol_type = other RNA
gattgaaacccacaagctg

SEQ ID NO: 926 - RNA, 19 nt, synthetic construct
  source 1..19: mol_type = other RNA
attgaaacccacaagctga

SEQ ID NO: 927 - RNA, 19 nt, synthetic construct
  source 1..19: mol_type = other RNA
ttgaaacccacaagctgac

SEQ ID NO: 928 - RNA, 19 nt, synthetic construct
  source 1..19: mol_type = other RNA
tgaaacccacaagctgacc

SEQ ID NO: 929 - RNA, 19 nt, synthetic construct
  source 1..19: mol_type = other RNA
gaaacccacaagctgacct

SEQ ID NO: 930 - RNA, 19 nt, synthetic construct
  source 1..19: mol_type = other RNA
aaacccacaagctgacctt

SEQ ID NO: 931 - RNA, 19 nt, synthetic construct
  source 1..19: mol_type = other RNA
aacccacaagctgaccttc

SEQ ID NO: 932 - RNA, 19 nt, synthetic construct
  source 1..19: mol_type = other RNA
gccaaagccaagacagacc

SEQ ID NO: 933 - RNA, 19 nt, synthetic construct
  source 1..19: mol_type = other RNA
ccaaagccaagacagacca

SEQ ID NO: 934 - RNA, 19 nt, synthetic construct
  source 1..19: mol_type = other RNA
tctttgtaaggacttgtgc

SEQ ID NO: 935 - RNA, 19 nt, synthetic construct
  source 1..19: mol_type = other RNA
ctttgtaaggacttgtgcc

SEQ ID NO: 936 - RNA, 19 nt, synthetic construct
  source 1..19: mol_type = other RNA
tttgtaaggacttgtgcct

SEQ ID NO: 937 - RNA, 19 nt, synthetic construct
  source 1..19: mol_type = other RNA
gtaaggacttgtgcctctt

SEQ ID NO: 938 - RNA, 19 nt, synthetic construct
  source 1..19: mol_type = other RNA
taaggacttgtgcctcttg

SEQ ID NO: 939 - RNA, 19 nt, synthetic construct
  source 1..19: mol_type = other RNA
aaggacttgtgcctcttgg

SEQ ID NO: 940 - RNA, 19 nt, synthetic construct
  source 1..19: mol_type = other RNA
gttgtagttggatttgtct

SEQ ID NO: 941 - RNA, 19 nt, synthetic construct
  source 1..19: mol_type = other RNA
ttgtagttggatttgtctg

SEQ ID NO: 942 - RNA, 19 nt, synthetic construct
  source 1..19: mol_type = other RNA
tgtagttggatttgtctgt

SEQ ID NO: 943 - RNA, 19 nt, synthetic construct
  source 1..19: mol_type = other RNA
gtagttggatttgtctgtt

SEQ ID NO: 944 - RNA, 19 nt, synthetic construct
  source 1..19: mol_type = other RNA
tagttggatttgtctgttt

SEQ ID NO: 945 - RNA, 19 nt, synthetic construct
  source 1..19: mol_type = other RNA
ttcaccagagtgactatga

SEQ ID NO: 946 - RNA, 19 nt, synthetic construct
  source 1..19: mol_type = other RNA
tcaccagagtgactatgat

SEQ ID NO: 947 - RNA, 19 nt, synthetic construct
  source 1..19: mol_type = other RNA
caccagagtgactatgata

SEQ ID NO: 948 - RNA, 19 nt, synthetic construct
  source 1..19: mol_type = other RNA
accagagtgactatgatag

SEQ ID NO: 949 - RNA, 19 nt, synthetic construct
  source 1..19: mol_type = other RNA
ccagagtgactatgatagt

SEQ ID NO: 950 - RNA, 19 nt, synthetic construct
  source 1..19: mol_type = other RNA
cagagtgactatgatagtg

SEQ ID NO: 951 - RNA, 19 nt, synthetic construct
  source 1..19: mol_type = other RNA
agagtgactatgatagtga

SEQ ID NO: 952 - RNA, 19 nt, synthetic construct
  source 1..19: mol_type = other RNA
gagtgactatgatagtgaa

SEQ ID NO: 953 - RNA, 19 nt, synthetic construct
  source 1..19: mol_type = other RNA
agtgactatgatagtgaaa

SEQ ID NO: 954 - RNA, 19 nt, synthetic construct
  source 1..19: mol_type = other RNA
gtgactatgatagtgaaaa

SEQ ID NO: 955 - RNA, 19 nt, synthetic construct
  source 1..19: mol_type = other RNA
tgactatgatagtgaaaag

SEQ ID NO: 956 - RNA, 19 nt, synthetic construct
  source 1..19: mol_type = other RNA
gactatgatagtgaaaaga

SEQ ID NO: 957 - RNA, 19 nt, synthetic construct
  source 1..19: mol_type = other RNA
actatgatagtgaaaagaa

SEQ ID NO: 958 - RNA, 19 nt, synthetic construct
  source 1..19: mol_type = other RNA
ctatgatagtgaaaagaaa

SEQ ID NO: 959 - RNA, 19 nt, synthetic construct
  source 1..19: mol_type = other RNA
tatgatagtgaaaagaaaa

SEQ ID NO: 960 - RNA, 19 nt, synthetic construct
  source 1..19: mol_type = other RNA
aaaaaaaaggacgcatgta

SEQ ID NO: 961 - RNA, 19 nt, synthetic construct
  source 1..19: mol_type = other RNA
aaaaaaaggacgcatgtat

SEQ ID NO: 962 - RNA, 19 nt, synthetic construct
  source 1..19: mol_type = other RNA
aaaaaaggacgcatgtatc

SEQ ID NO: 963 - RNA, 19 nt, synthetic construct
  source 1..19: mol_type = other RNA
aaaaaggacgcatgtatct

SEQ ID NO: 964 - RNA, 19 nt, synthetic construct
  source 1..19: mol_type = other RNA
aaaaggacgcatgtatctt

SEQ ID NO: 965 - RNA, 19 nt, synthetic construct
  source 1..19: mol_type = other RNA
aaaggacgcatgtatcttg

SEQ ID NO: 966 - RNA, 19 nt, synthetic construct
  source 1..19: mol_type = other RNA
aaggacgcatgtatcttga

SEQ ID NO: 967 - RNA, 19 nt, synthetic construct
  source 1..19: mol_type = other RNA
aggacgcatgtatcttgaa

SEQ ID NO: 968 - RNA, 19 nt, synthetic construct
  source 1..19: mol_type = other RNA
ggacgcatgtatcttgaaa

SEQ ID NO: 969 - RNA, 19 nt, synthetic construct
  source 1..19: mol_type = other RNA
gacgcatgtatcttgaaat

SEQ ID NO: 970 - RNA, 19 nt, synthetic construct
  source 1..19: mol_type = other RNA
tcactttatcaatagttcc

SEQ ID NO: 971 - RNA, 19 nt, synthetic construct
  source 1..19: mol_type = other RNA
cactttatcaatagttcca

SEQ ID NO: 972 - RNA, 19 nt, synthetic construct
  source 1..19: mol_type = other RNA
actttatcaatagttccat

SEQ ID NO: 973 - RNA, 19 nt, synthetic construct
  source 1..19: mol_type = other RNA
ctttatcaatagttccatt

SEQ ID NO: 974 - RNA, 19 nt, synthetic construct
  source 1..19: mol_type = other RNA
tttatcaatagttccattt

SEQ ID NO: 975 - RNA, 19 nt, synthetic construct
  source 1..19: mol_type = other RNA
ttatcaatagttccattta

SEQ ID NO: 976 - RNA, 19 nt, synthetic construct
  source 1..19: mol_type = other RNA
tatcaatagttccatttaa

SEQ ID NO: 977 - RNA, 19 nt, synthetic construct
  source 1..19: mol_type = other RNA
atcaatagttccatttaaa

SEQ ID NO: 978 - RNA, 19 nt, synthetic construct
  source 1..19: mol_type = other RNA
tcaatagttccatttaaat

SEQ ID NO: 979 - RNA, 19 nt, synthetic construct
  source 1..19: mol_type = other RNA
caatagttccatttaaatt

SEQ ID NO: 980 - RNA, 19 nt, synthetic construct
  source 1..19: mol_type = other RNA
aatagttccatttaaattg

SEQ ID NO: 981 - RNA, 19 nt, synthetic construct
  source 1..19: mol_type = other RNA
atagttccatttaaattga

SEQ ID NO: 982 - RNA, 19 nt, synthetic construct
  source 1..19: mol_type = other RNA
tagttccatttaaattgac

SEQ ID NO: 983 - RNA, 19 nt, synthetic construct
  source 1..19: mol_type = other RNA
agttccatttaaattgact

SEQ ID NO: 984 - RNA, 19 nt, synthetic construct
  source 1..19: mol_type = other RNA
gttccatttaaattgactt

SEQ ID NO: 985 - RNA, 19 nt, synthetic construct
  source 1..19: mol_type = other RNA
ttccatttaaattgacttc

SEQ ID NO: 986 - RNA, 19 nt, synthetic construct
  source 1..19: mol_type = other RNA
tccatttaaattgacttca

SEQ ID NO: 987 - RNA, 19 nt, synthetic construct
  source 1..19: mol_type = other RNA
cttgcaagtcccatgattt

SEQ ID NO: 988 - RNA, 19 nt, synthetic construct
  source 1..19: mol_type = other RNA
ttgcaagtcccatgatttc

SEQ ID NO: 989 - RNA, 19 nt, synthetic construct
  source 1..19: mol_type = other RNA
tgcaagtcccatgatttct

SEQ ID NO: 990 - RNA, 19 nt, synthetic construct
  source 1..19: mol_type = other RNA
gcaagtcccatgatttctt

SEQ ID NO: 991 - RNA, 19 nt, synthetic construct
  source 1..19: mol_type = other RNA
gtaaaagtgaatttggaaa

SEQ ID NO: 992 - RNA, 19 nt, synthetic construct
  source 1..19: mol_type = other RNA
taaaagtgaatttggaaat

SEQ ID NO: 993 - RNA, 19 nt, synthetic construct
  source 1..19: mol_type = other RNA
aaaagtgaatttggaaata

SEQ ID NO: 994 - RNA, 19 nt, synthetic construct
  source 1..19: mol_type = other RNA
aaagtgaatttggaaataa

SEQ ID NO: 995 - RNA, 19 nt, synthetic construct
  source 1..19: mol_type = other RNA
aagtgaatttggaaataaa

SEQ ID NO: 996 - RNA, 19 nt, synthetic construct
  source 1..19: mol_type = other RNA
agtgaatttggaaataaag

SEQ ID NO: 997 - RNA, 19 nt, synthetic construct
  source 1..19: mol_type = other RNA
gtgaatttggaaataaagt

SEQ ID NO: 998 - RNA, 19 nt, synthetic construct
  source 1..19: mol_type = other RNA
tgaatttggaaataaagtt

SEQ ID NO: 999 - RNA, 19 nt, synthetic construct
  source 1..19: mol_type = other RNA
gaatttggaaataaagtta

SEQ ID NO: 1000 - RNA, 19 nt, synthetic construct
  source 1..19: mol_type = other RNA
aatttggaaataaagttat

SEQ ID NO: 1001 - RNA, 19 nt, synthetic construct
  source 1..19: mol_type = other RNA
atttggaaataaagttatt

SEQ ID NO: 1002 - RNA, 19 nt, synthetic construct
  source 1..19: mol_type = other RNA
tttggaaataaagttatta

SEQ ID NO: 1003 - RNA, 19 nt, synthetic construct
  source 1..19: mol_type = other RNA
ttggaaataaagttattac

SEQ ID NO: 1004 - RNA, 19 nt, synthetic construct
  source 1..19: mol_type = other RNA
tggaaataaagttattact

SEQ ID NO: 1005 - RNA, 19 nt, synthetic construct
  source 1..19: mol_type = other RNA
ggaaataaagttattactc

SEQ ID NO: 1006 - RNA, 19 nt, synthetic construct
  source 1..19: mol_type = other RNA
gaaataaagttattactct

SEQ ID NO: 1007 - RNA, 19 nt, synthetic construct
  source 1..19: mol_type = other RNA
aaataaagttattactctg

SEQ ID NO: 1008 - RNA, 19 nt, synthetic construct
  source 1..19: mol_type = other RNA
aggagttcgaagtgatgga

SEQ ID NO: 1009 - RNA, 19 nt, synthetic construct
  source 1..19: mol_type = other RNA
ggagttcgaagtgatggaa

SEQ ID NO: 1010 - RNA, 19 nt, synthetic construct
  source 1..19: mol_type = other RNA
gagttcgaagtgatggaag

SEQ ID NO: 1011 - RNA, 19 nt, synthetic construct
  source 1..19: mol_type = other RNA
gttcgaagtgatggaagat

SEQ ID NO: 1012 - RNA, 19 nt, synthetic construct
  source 1..19: mol_type = other RNA
tcgaagtgatggaagatca

SEQ ID NO: 1013 - RNA, 19 nt, synthetic construct
  source 1..19: mol_type = other RNA
gtgatggaagatcacgctg

SEQ ID NO: 1014 - RNA, 19 nt, synthetic construct
  source 1..19: mol_type = other RNA
acgtacgggttgggggaca

SEQ ID NO: 1015 - RNA, 19 nt, synthetic construct
  source 1..19: mol_type = other RNA
cgggttgggggacaggaaa

SEQ ID NO: 1016 - RNA, 19 nt, synthetic construct
  source 1..19: mol_type = other RNA
caagaccaagagggtgaca

SEQ ID NO: 1017 - RNA, 19 nt, synthetic construct
  source 1..19: mol_type = other RNA
ggaagacgaagctgctggt

SEQ ID NO: 1018 - RNA, 19 nt, synthetic construct
  source 1..19: mol_type = other RNA
gaagacgaagctgctggtc

SEQ ID NO: 1019 - RNA, 19 nt, synthetic construct
  source 1..19: mol_type = other RNA
aagacgaagctgctggtca

SEQ ID NO: 1020 - RNA, 19 nt, synthetic construct
  source 1..19: mol_type = other RNA
acgaagctgctggtcacgt

SEQ ID NO: 1021 - RNA, 19 nt, synthetic construct
  source 1..19: mol_type = other RNA
gaagctgctggtcacgtga

SEQ ID NO: 1022 - RNA, 19 nt, synthetic construct
  source 1..19: mol_type = other RNA
aagctgctggtcacgtgac

SEQ ID NO: 1023 - RNA, 19 nt, synthetic construct
  source 1..19: mol_type = other RNA
cgcatggtcagtaaaagca

SEQ ID NO: 1024 - RNA, 19 nt, synthetic construct
  source 1..19: mol_type = other RNA
gcatggtcagtaaaagcaa

SEQ ID NO: 1025 - RNA, 19 nt, synthetic construct
  source 1..19: mol_type = other RNA
tggtcagtaaaagcaaaga

SEQ ID NO: 1026 - RNA, 19 nt, synthetic construct
  source 1..19: mol_type = other RNA
ggtcagtaaaagcaaagac

SEQ ID NO: 1027 - RNA, 19 nt, synthetic construct
  source 1..19: mol_type = other RNA
gtcagtaaaagcaaagacg

SEQ ID NO: 1028 - RNA, 19 nt, synthetic construct
  source 1..19: mol_type = other RNA
agtaaaagcaaagacggga

SEQ ID NO: 1029 - RNA, 19 nt, synthetic construct
  source 1..19: mol_type = other RNA
gtaaaagcaaagacgggac

SEQ ID NO: 1030 - RNA, 19 nt, synthetic construct
  source 1..19: mol_type = other RNA
caaagacgggactggaagc

SEQ ID NO: 1031 - RNA, 19 nt, synthetic construct
  source 1..19: mol_type = other RNA
aagacgggactggaagcga

SEQ ID NO: 1032 - RNA, 19 nt, synthetic construct
  source 1..19: mol_type = other RNA
agacgggactggaagcgat

SEQ ID NO: 1033 - RNA, 19 nt, synthetic construct
  source 1..19: mol_type = other RNA
cgggactggaagcgatgac

SEQ ID NO: 1034 - RNA, 19 nt, synthetic construct
  source 1..19: mol_type = other RNA
gggactggaagcgatgaca

SEQ ID NO: 1035 - RNA, 19 nt, synthetic construct
  source 1..19: mol_type = other RNA
ggactggaagcgatgacaa

SEQ ID NO: 1036 - RNA, 19 nt, synthetic construct
  source 1..19: mol_type = other RNA
actggaagcgatgacaaaa

SEQ ID NO: 1037 - RNA, 19 nt, synthetic construct
  source 1..19: mol_type = other RNA
ctggaagcgatgacaaaaa

SEQ ID NO: 1038 - RNA, 19 nt, synthetic construct
  source 1..19: mol_type = other RNA
tggaagcgatgacaaaaaa

SEQ ID NO: 1039 - RNA, 19 nt, synthetic construct
  source 1..19: mol_type = other RNA
ggaagcgatgacaaaaaag

SEQ ID NO: 1040 - RNA, 19 nt, synthetic construct
  source 1..19: mol_type = other RNA
gaagcgatgacaaaaaagc

SEQ ID NO: 1041 - RNA, 19 nt, synthetic construct
  source 1..19: mol_type = other RNA
aagcgatgacaaaaaagcc

SEQ ID NO: 1042 - RNA, 19 nt, synthetic construct
  source 1..19: mol_type = other RNA
agcgatgacaaaaaagcca

SEQ ID NO: 1043 - RNA, 19 nt, synthetic construct
  source 1..19: mol_type = other RNA
gcgatgacaaaaaagccaa

SEQ ID NO: 1044 - RNA, 19 nt, synthetic construct
  source 1..19: mol_type = other RNA
gatggtaaaacgaagatcg

SEQ ID NO: 1045 - RNA, 19 nt, synthetic construct
  source 1..19: mol_type = other RNA
aacgccaccaggattccag

SEQ ID NO: 1046 - RNA, 19 nt, synthetic construct
  source 1..19: mol_type = other RNA
aagacaccacccagctctg

SEQ ID NO: 1047 - RNA, 19 nt, synthetic construct
  source 1..19: mol_type = other RNA
acctccaaaatcaggggat

SEQ ID NO: 1048 - RNA, 19 nt, synthetic construct
  source 1..19: mol_type = other RNA
tgcccatgccagacctgaa

SEQ ID NO: 1049 - RNA, 19 nt, synthetic construct
  source 1..19: mol_type = other RNA
cccatgccagacctgaaga

SEQ ID NO: 1050 - RNA, 19 nt, synthetic construct
  source 1..19: mol_type = other RNA
ccatgccagacctgaagaa

SEQ ID NO: 1051 - RNA, 19 nt, synthetic construct
  source 1..19: mol_type = other RNA
catgccagacctgaagaat

SEQ ID NO: 1052 - RNA, 19 nt, synthetic construct
  source 1..19: mol_type = other RNA
gacctgaagaatgtcaagt

SEQ ID NO: 1053 - RNA, 19 nt, synthetic construct
  source 1..19: mol_type = other RNA
acctgaagaatgtcaagtc

SEQ ID NO: 1054 - RNA, 19 nt, synthetic construct
  source 1..19: mol_type = other RNA
cctgaagaatgtcaagtcc

SEQ ID NO: 1055 - RNA, 19 nt, synthetic construct
  source 1..19: mol_type = other RNA
ctgaagaatgtcaagtcca

SEQ ID NO: 1056 - RNA, 19 nt, synthetic construct
  source 1..19: mol_type = other RNA
tgaagaatgtcaagtccaa

SEQ ID NO: 1057 - RNA, 19 nt, synthetic construct
  source 1..19: mol_type = other RNA
gtcaagtccaagatcggct

SEQ ID NO: 1058 - RNA, 19 nt, synthetic construct
  source 1..19: mol_type = other RNA
ccactgagaacctgaagca

SEQ ID NO: 1059 - RNA, 19 nt, synthetic construct
  source 1..19: mol_type = other RNA
cactgagaacctgaagcac

SEQ ID NO: 1060 - RNA, 19 nt, synthetic construct
  source 1..19: mol_type = other RNA
gcaaatagtctacaaacca

SEQ ID NO: 1061 - RNA, 19 nt, synthetic construct
  source 1..19: mol_type = other RNA
caaatagtctacaaaccag

SEQ ID NO: 1062 - RNA, 19 nt, synthetic construct
  source 1..19: mol_type = other RNA
aaatagtctacaaaccagt

SEQ ID NO: 1063 - RNA, 19 nt, synthetic construct
  source 1..19: mol_type = other RNA
aatagtctacaaaccagtt

SEQ ID NO: 1064 - RNA, 19 nt, synthetic construct
  source 1..19: mol_type = other RNA
atagtctacaaaccagttg

SEQ ID NO: 1065 - RNA, 19 nt, synthetic construct
  source 1..19: mol_type = other RNA
tagtctacaaaccagttga

SEQ ID NO: 1066 - RNA, 19 nt, synthetic construct
  source 1..19: mol_type = other RNA
agtctacaaaccagttgac

SEQ ID NO: 1067 - RNA, 19 nt, synthetic construct
  source 1..19: mol_type = other RNA
gtctacaaaccagttgacc

SEQ ID NO: 1068 - RNA, 19 nt, synthetic construct
  source 1..19: mol_type = other RNA
tctacaaaccagttgacct

SEQ ID NO: 1069 - RNA, 19 nt, synthetic construct
  source 1..19: mol_type = other RNA
ctacaaaccagttgacctg

SEQ ID NO: 1070 - RNA, 19 nt, synthetic construct
  source 1..19: mol_type = other RNA
tacaaaccagttgacctga

SEQ ID NO: 1071 - RNA, 19 nt, synthetic construct
  source 1..19: mol_type = other RNA
acaaaccagttgacctgag

SEQ ID NO: 1072 - RNA, 19 nt, synthetic construct
  source 1..19: mol_type = other RNA
caaaccagttgacctgagc

SEQ ID NO: 1073 - RNA, 19 nt, synthetic construct
  source 1..19: mol_type = other RNA
aaaccagttgacctgagca

SEQ ID NO: 1074 - RNA, 19 nt, synthetic construct
  source 1..19: mol_type = other RNA
aaccagttgacctgagcaa

SEQ ID NO: 1075 - RNA, 19 nt, synthetic construct
  source 1..19: mol_type = other RNA
accagttgacctgagcaag

SEQ ID NO: 1076 - RNA, 19 nt, synthetic construct
  source 1..19: mol_type = other RNA
cagttgacctgagcaaggt

SEQ ID NO: 1077 - RNA, 19 nt, synthetic construct
  source 1..19: mol_type = other RNA
gttgacctgagcaaggtga

SEQ ID NO: 1078 - RNA, 19 nt, synthetic construct
  source 1..19: mol_type = other RNA
ttgacctgagcaaggtgac

SEQ ID NO: 1079 - RNA, 19 nt, synthetic construct
  source 1..19: mol_type = other RNA
gacctgagcaaggtgacct

SEQ ID NO: 1080 - RNA, 19 nt, synthetic construct
  source 1..19: mol_type = other RNA
ctgagcaaggtgacctcca

SEQ ID NO: 1081 - RNA, 19 nt, synthetic construct
  source 1..19: mol_type = other RNA
caaggtgacctccaagtgt

SEQ ID NO: 1082 - RNA, 19 nt, synthetic construct
  source 1..19: mol_type = other RNA
aaggtgacctccaagtgtg

SEQ ID NO: 1083 - RNA, 19 nt, synthetic construct
  source 1..19: mol_type = other RNA
aggtgacctccaagtgtgg

SEQ ID NO: 1084 - RNA, 19 nt, synthetic construct
  source 1..19: mol_type = other RNA
ctccaagtgtggctcatta

SEQ ID NO: 1085 - RNA, 19 nt, synthetic construct
  source 1..19: mol_type = other RNA
gtggctcattaggcaacat

SEQ ID NO: 1086 - RNA, 19 nt, synthetic construct
  source 1..19: mol_type = other RNA
tggctcattaggcaacatc

SEQ ID NO: 1087 - RNA, 19 nt, synthetic construct
  source 1..19: mol_type = other RNA
gctcattaggcaacatcca

SEQ ID NO: 1088 - RNA, 19 nt, synthetic construct
  source 1..19: mol_type = other RNA
ctcattaggcaacatccat

SEQ ID NO: 1089 - RNA, 19 nt, synthetic construct
  source 1..19: mol_type = other RNA
cattaggcaacatccatca

SEQ ID NO: 1090 - RNA, 19 nt, synthetic construct
  source 1..19: mol_type = other RNA
attaggcaacatccatcat

SEQ ID NO: 1091 - RNA, 19 nt, synthetic construct
  source 1..19: mol_type = other RNA
ttaggcaacatccatcata

SEQ ID NO: 1092 - RNA, 19 nt, synthetic construct
  source 1..19: mol_type = other RNA
aggcaacatccatcataaa

SEQ ID NO: 1093 - RNA, 19 nt, synthetic construct
  source 1..19: mol_type = other RNA
aacatccatcataaaccag

SEQ ID NO: 1094 - RNA, 19 nt, synthetic construct
  source 1..19: mol_type = other RNA
ccaggtggaagtaaaatct

SEQ ID NO: 1095 - RNA, 19 nt, synthetic construct
  source 1..19: mol_type = other RNA
caggtggaagtaaaatctg

SEQ ID NO: 1096 - RNA, 19 nt, synthetic construct
  source 1..19: mol_type = other RNA
aggtggaagtaaaatctga

SEQ ID NO: 1097 - RNA, 19 nt, synthetic construct
  source 1..19: mol_type = other RNA
ggtggaagtaaaatctgag

SEQ ID NO: 1098 - RNA, 19 nt, synthetic construct
  source 1..19: mol_type = other RNA
gtggaagtaaaatctgaga

SEQ ID NO: 1099 - RNA, 19 nt, synthetic construct
  source 1..19: mol_type = other RNA
tggaagtaaaatctgagaa

SEQ ID NO: 1100 - RNA, 19 nt, synthetic construct
  source 1..19: mol_type = other RNA
ggaagtaaaatctgagaag

SEQ ID NO: 1101 - RNA, 19 nt, synthetic construct
  source 1..19: mol_type = other RNA
gaagtaaaatctgagaagc

SEQ ID NO: 1102 - RNA, 19 nt, synthetic construct
  source 1..19: mol_type = other RNA
aagtaaaatctgagaagct

SEQ ID NO: 1103 - RNA, 19 nt, synthetic construct
  source 1..19: mol_type = other RNA
agtaaaatctgagaagctt

SEQ ID NO: 1104 - RNA, 19 nt, synthetic construct
  source 1..19: mol_type = other RNA
tctgagaagcttgacttca

SEQ ID NO: 1105 - RNA, 19 nt, synthetic construct
  source 1..19: mol_type = other RNA
ctgagaagcttgacttcaa

SEQ ID NO: 1106 - RNA, 19 nt, synthetic construct
  source 1..19: mol_type = other RNA
tgagaagcttgacttcaag

SEQ ID NO: 1107 - RNA, 19 nt, synthetic construct
  source 1..19: mol_type = other RNA
gagaagcttgacttcaagg

SEQ ID NO: 1108 - RNA, 19 nt, synthetic construct
  source 1..19: mol_type = other RNA
agaagcttgacttcaagga

SEQ ID NO: 1109 - RNA, 19 nt, synthetic construct
  source 1..19: mol_type = other RNA
gaagcttgacttcaaggac

SEQ ID NO: 1110 - RNA, 19 nt, synthetic construct
  source 1..19: mol_type = other RNA
aagcttgacttcaaggaca

SEQ ID NO: 1111 - RNA, 19 nt, synthetic construct
  source 1..19: mol_type = other RNA
agcttgacttcaaggacag

SEQ ID NO: 1112 - RNA, 19 nt, synthetic construct
  source 1..19: mol_type = other RNA
gcttgacttcaaggacaga

SEQ ID NO: 1113 - RNA, 19 nt, synthetic construct
  source 1..19: mol_type = other RNA
cttgacttcaaggacagag

SEQ ID NO: 1114 - RNA, 19 nt, synthetic construct
  source 1..19: mol_type = other RNA
ttgacttcaaggacagagt

SEQ ID NO: 1115 - RNA, 19 nt, synthetic construct
  source 1..19: mol_type = other RNA
aaggacagagtccagtcga

SEQ ID NO: 1116 - RNA, 19 nt, synthetic construct
  source 1..19: mol_type = other RNA
aggacagagtccagtcgaa

SEQ ID NO: 1117 - RNA, 19 nt, synthetic construct
  source 1..19: mol_type = other RNA
gggtccctggacaatatca

SEQ ID NO: 1118 - RNA, 19 nt, synthetic construct
  source 1..19: mol_type = other RNA
gaggaaataaaaagattga

SEQ ID NO: 1119 - RNA, 19 nt, synthetic construct
  source 1..19: mol_type = other RNA
aggaaataaaaagattgaa

SEQ ID NO: 1120 - RNA, 19 nt, synthetic construct
  source 1..19: mol_type = other RNA
ggaaataaaaagattgaaa

SEQ ID NO: 1121 - RNA, 19 nt, synthetic construct
  source 1..19: mol_type = other RNA
gaaataaaaagattgaaac

SEQ ID NO: 1122 - RNA, 19 nt, synthetic construct
  source 1..19: mol_type = other RNA
aaataaaaagattgaaacc

SEQ ID NO: 1123 - RNA, 19 nt, synthetic construct
  source 1..19: mol_type = other RNA
aataaaaagattgaaaccc

SEQ ID NO: 1124 - RNA, 19 nt, synthetic construct
  source 1..19: mol_type = other RNA
ataaaaagattgaaaccca

SEQ ID NO: 1125 - RNA, 19 nt, synthetic construct
  source 1..19: mol_type = other RNA
aaaaagattgaaacccaca

SEQ ID NO: 1126 - RNA, 19 nt, synthetic construct
  source 1..19: mol_type = other RNA
aaaagattgaaacccacaa

SEQ ID NO: 1127 - RNA, 19 nt, synthetic construct
  source 1..19: mol_type = other RNA
cggcatctcagcaatgtct

SEQ ID NO: 1128 - RNA, 19 nt, synthetic construct
  source 1..19: mol_type = other RNA
gcatcgacatggtagactc

SEQ ID NO: 1129 - RNA, 19 nt, synthetic construct
  source 1..19: mol_type = other RNA
ctggccaagcagggtttgt

SEQ ID NO: 1130 - RNA, 19 nt, synthetic construct
  source 1..19: mol_type = other RNA
agagtgtggaaaaaaaaag

SEQ ID NO: 1131 - RNA, 19 nt, synthetic construct
  source 1..19: mol_type = other RNA
gagtgtggaaaaaaaaaga

SEQ ID NO: 1132 - RNA, 19 nt, synthetic construct
  source 1..19: mol_type = other RNA
gtgtggaaaaaaaaagaat

SEQ ID NO: 1133 - RNA, 19 nt, synthetic construct
  source 1..19: mol_type = other RNA
gcagttcggttaattggtt

SEQ ID NO: 1134 - RNA, 19 nt, synthetic construct
  source 1..19: mol_type = other RNA
ggcaattccttttgattct

SEQ ID NO: 1135 - RNA, 19 nt, synthetic construct
  source 1..19: mol_type = other RNA
agcaacaaaggatttgaaa

SEQ ID NO: 1136 - RNA, 19 nt, synthetic construct
  source 1..19: mol_type = other RNA
acaaaggatttgaaacttg

SEQ ID NO: 1137 - RNA, 19 nt, synthetic construct
  source 1..19: mol_type = other RNA
aaaggatttgaaacttggt

SEQ ID NO: 1138 - RNA, 19 nt, synthetic construct
  source 1..19: mol_type = other RNA
aggatttgaaacttggtgt

SEQ ID NO: 1139 - RNA, 19 nt, synthetic construct
  source 1..19: mol_type = other RNA
cgatgtcaaccttgtgtga

SEQ ID NO: 1140 - RNA, 19 nt, synthetic construct
  source 1..19: mol_type = other RNA
aaagactgaccttgatgtc

SEQ ID NO: 1141 - RNA, 19 nt, synthetic construct
  source 1..19: mol_type = other RNA
ctccacagaaaccctgttt

SEQ ID NO: 1142 - RNA, 19 nt, synthetic construct
  source 1..19: mol_type = other RNA
ccacagaaaccctgtttta

SEQ ID NO: 1143 - RNA, 19 nt, synthetic construct
  source 1..19: mol_type = other RNA
cacagaaaccctgttttat

SEQ ID NO: 1144 - RNA, 19 nt, synthetic construct
  source 1..19: mol_type = other RNA
acagaaaccctgttttatt

SEQ ID NO: 1145 - RNA, 19 nt, synthetic construct
  source 1..19: mol_type = other RNA
cagaaaccctgttttattg

SEQ ID NO: 1146 - RNA, 19 nt, synthetic construct
  source 1..19: mol_type = other RNA
agaaaccctgttttattga

SEQ ID NO: 1147 - RNA, 19 nt, synthetic construct
  source 1..19: mol_type = other RNA
gaaaccctgttttattgag

SEQ ID NO: 1148 - RNA, 19 nt, synthetic construct
  source 1..19: mol_type = other RNA
aaaccctgttttattgagt

SEQ ID NO: 1149 - RNA, 19 nt, synthetic construct
  source 1..19: mol_type = other RNA
aaccctgttttattgagtt

SEQ ID NO: 1150 - RNA, 19 nt, synthetic construct
  source 1..19: mol_type = other RNA
accctgttttattgagttc

SEQ ID NO: 1151 - RNA, 19 nt, synthetic construct
  source 1..19: mol_type = other RNA
ccctgttttattgagttct

SEQ ID NO: 1152 - RNA, 19 nt, synthetic construct
  source 1..19: mol_type = other RNA
cctgttttattgagttctg

SEQ ID NO: 1153 - RNA, 19 nt, synthetic construct
  source 1..19: mol_type = other RNA
ctgttttattgagttctga

SEQ ID NO: 1154 - RNA, 19 nt, synthetic construct
  source 1..19: mol_type = other RNA
tgttttattgagttctgaa

SEQ ID NO: 1155 - RNA, 19 nt, synthetic construct
  source 1..19: mol_type = other RNA
ttttattgagttctgaagg

SEQ ID NO: 1156 - RNA, 19 nt, synthetic construct
  source 1..19: mol_type = other RNA
ttattgagttctgaaggtt

SEQ ID NO: 1157 - RNA, 19 nt, synthetic construct
  source 1..19: mol_type = other RNA
attgagttctgaaggttgg

SEQ ID NO: 1158 - RNA, 19 nt, synthetic construct
  source 1..19: mol_type = other RNA
ttgagttctgaaggttgga

SEQ ID NO: 1159 - RNA, 19 nt, synthetic construct
  source 1..19: mol_type = other RNA
aaccagttctctttgtaag

SEQ ID NO: 1160 - RNA, 19 nt, synthetic construct
  source 1..19: mol_type = other RNA
accagttctctttgtaagg

SEQ ID NO: 1161 - RNA, 19 nt, synthetic construct
  source 1..19: mol_type = other RNA
ccagttctctttgtaagga

SEQ ID NO: 1162 - RNA, 19 nt, synthetic construct
  source 1..19: mol_type = other RNA
cagttctctttgtaaggac

SEQ ID NO: 1163 - RNA, 19 nt, synthetic construct
  source 1..19: mol_type = other RNA
ctactccatactgagggtg

SEQ ID NO: 1164 - RNA, 19 nt, synthetic construct
  source 1..19: mol_type = other RNA
tactccatactgagggtga

SEQ ID NO: 1165 - RNA, 19 nt, synthetic construct
  source 1..19: mol_type = other RNA
actccatactgagggtgaa

SEQ ID NO: 1166 - RNA, 19 nt, synthetic construct
  source 1..19: mol_type = other RNA
ctccatactgagggtgaaa

SEQ ID NO: 1167 - RNA, 19 nt, synthetic construct
  source 1..19: mol_type = other RNA
atactgagggtgaaattaa

SEQ ID NO: 1168 - RNA, 19 nt, synthetic construct
  source 1..19: mol_type = other RNA
gagggtgaaattaagggaa

SEQ ID NO: 1169 - RNA, 19 nt, synthetic construct
  source 1..19: mol_type = other RNA
ggtgtttctgccttgttga

SEQ ID NO: 1170 - RNA, 19 nt, synthetic construct
  source 1..19: mol_type = other RNA
ctggagcagctgaacatat

SEQ ID NO: 1171 - RNA, 19 nt, synthetic construct
  source 1..19: mol_type = other RNA
tggagcagctgaacatata

SEQ ID NO: 1172 - RNA, 19 nt, synthetic construct
  source 1..19: mol_type = other RNA
gagcagctgaacatataca

SEQ ID NO: 1173 - RNA, 19 nt, synthetic construct
  source 1..19: mol_type = other RNA
agcagctgaacatatacat

SEQ ID NO: 1174 - RNA, 19 nt, synthetic construct
  source 1..19: mol_type = other RNA
gcagctgaacatatacata

SEQ ID NO: 1175 - RNA, 19 nt, synthetic construct
  source 1..19: mol_type = other RNA
cagctgaacatatacatag

SEQ ID NO: 1176 - RNA, 19 nt, synthetic construct
  source 1..19: mol_type = other RNA
agctgaacatatacataga

SEQ ID NO: 1177 - RNA, 19 nt, synthetic construct
  source 1..19: mol_type = other RNA
gctgaacatatacatagat

SEQ ID NO: 1178 - RNA, 19 nt, synthetic construct
  source 1..19: mol_type = other RNA
gaacatatacatagatgtt

SEQ ID NO: 1179 - RNA, 19 nt, synthetic construct
  source 1..19: mol_type = other RNA
aacatatacatagatgttg

SEQ ID NO: 1180 - RNA, 19 nt, synthetic construct
  source 1..19: mol_type = other RNA
gagttgtagttggatttgt

SEQ ID NO: 1181 - RNA, 19 nt, synthetic construct
  source 1..19: mol_type = other RNA
agttgtagttggatttgtc

SEQ ID NO: 1182 - RNA, 19 nt, synthetic construct
  source 1..19: mol_type = other RNA
agttggatttgtctgttta

SEQ ID NO: 1183 - RNA, 19 nt, synthetic construct
  source 1..19: mol_type = other RNA
gttggatttgtctgtttat

SEQ ID NO: 1184 - RNA, 19 nt, synthetic construct
  source 1..19: mol_type = other RNA
ttggatttgtctgtttatg

SEQ ID NO: 1185 - RNA, 19 nt, synthetic construct
  source 1..19: mol_type = other RNA
ggatttgtctgtttatgct

SEQ ID NO: 1186 - RNA, 19 nt, synthetic construct
  source 1..19: mol_type = other RNA
gatttgtctgtttatgctt

SEQ ID NO: 1187 - RNA, 19 nt, synthetic construct
  source 1..19: mol_type = other RNA
atttgtctgtttatgcttg

SEQ ID NO: 1188 - RNA, 19 nt, synthetic construct
  source 1..19: mol_type = other RNA
tttgtctgtttatgcttgg

SEQ ID NO: 1189 - RNA, 19 nt, synthetic construct
  source 1..19: mol_type = other RNA
ttgtctgtttatgcttgga

SEQ ID NO: 1190 - RNA, 19 nt, synthetic construct
  source 1..19: mol_type = other RNA
tgtctgtttatgcttggat

SEQ ID NO: 1191 - RNA, 19 nt, synthetic construct
  source 1..19: mol_type = other RNA
gtctgtttatgcttggatt

SEQ ID NO: 1192 - RNA, 19 nt, synthetic construct
  source 1..19: mol_type = other RNA
tctgtttatgcttggattc

SEQ ID NO: 1193 - RNA, 19 nt, synthetic construct
  source 1..19: mol_type = other RNA
ctgtttatgcttggattca

SEQ ID NO: 1194 - RNA, 19 nt, synthetic construct
  source 1..19: mol_type = other RNA
tgtttatgcttggattcac

SEQ ID NO: 1195 - RNA, 19 nt, synthetic construct
  source 1..19: mol_type = other RNA
tttatgcttggattcacca

SEQ ID NO: 1196 - RNA, 19 nt, synthetic construct
  source 1..19: mol_type = other RNA
tatgcttggattcaccaga

SEQ ID NO: 1197 - RNA, 19 nt, synthetic construct
  source 1..19: mol_type = other RNA
atgcttggattcaccagag

SEQ ID NO: 1198 - RNA, 19 nt, synthetic construct
  source 1..19: mol_type = other RNA
tgcttggattcaccagagt

SEQ ID NO: 1199 - RNA, 19 nt, synthetic construct
  source 1..19: mol_type = other RNA
gcttggattcaccagagtg

SEQ ID NO: 1200 - RNA, 19 nt, synthetic construct
  source 1..19: mol_type = other RNA
cttggattcaccagagtga

SEQ ID NO: 1201 - RNA, 19 nt, synthetic construct
  source 1..19: mol_type = other RNA
ttggattcaccagagtgac

SEQ ID NO: 1202 - RNA, 19 nt, synthetic construct
  source 1..19: mol_type = other RNA
tggattcaccagagtgact

SEQ ID NO: 1203 - RNA, 19 nt, synthetic construct
  source 1..19: mol_type = other RNA
ggattcaccagagtgacta

SEQ ID NO: 1204 - RNA, 19 nt, synthetic construct
  source 1..19: mol_type = other RNA
gattcaccagagtgactat

SEQ ID NO: 1205 - RNA, 19 nt, synthetic construct
  source 1..19: mol_type = other RNA
acgcatgtatcttgaaatg

SEQ ID NO: 1206 - RNA, 19 nt, synthetic construct
  source 1..19: mol_type = other RNA
cgcatgtatcttgaaatgc

SEQ ID NO: 1207 - RNA, 19 nt, synthetic construct
  source 1..19: mol_type = other RNA
gcatgtatcttgaaatgct

SEQ ID NO: 1208 - RNA, 19 nt, synthetic construct
  source 1..19: mol_type = other RNA
catgtatcttgaaatgctt

SEQ ID NO: 1209 - RNA, 19 nt, synthetic construct
  source 1..19: mol_type = other RNA
atgtatcttgaaatgcttg

SEQ ID NO: 1210 - RNA, 19 nt, synthetic construct
  source 1..19: mol_type = other RNA
tgtatcttgaaatgcttgt

SEQ ID NO: 1211 - RNA, 19 nt, synthetic construct
  source 1..19: mol_type = other RNA
gtatcttgaaatgcttgta

SEQ ID NO: 1212 - RNA, 19 nt, synthetic construct
  source 1..19: mol_type = other RNA
tatcttgaaatgcttgtaa

SEQ ID NO: 1213 - RNA, 19 nt, synthetic construct
  source 1..19: mol_type = other RNA
atcttgaaatgcttgtaaa

SEQ ID NO: 1214 - RNA, 19 nt, synthetic construct
  source 1..19: mol_type = other RNA
cttgaaatgcttgtaaaga

SEQ ID NO: 1215 - RNA, 19 nt, synthetic construct
  source 1..19: mol_type = other RNA
tgaaatgcttgtaaagagg

SEQ ID NO: 1216 - RNA, 19 nt, synthetic construct
  source 1..19: mol_type = other RNA
gaaatgcttgtaaagaggt

SEQ ID NO: 1217 - RNA, 19 nt, synthetic construct
  source 1..19: mol_type = other RNA
aaatgcttgtaaagaggtt

SEQ ID NO: 1218 - RNA, 19 nt, synthetic construct
  source 1..19: mol_type = other RNA
aatgcttgtaaagaggttt

SEQ ID NO: 1219 - RNA, 19 nt, synthetic construct
  source 1..19: mol_type = other RNA
tgcttgtaaagaggtttct

SEQ ID NO: 1220 - RNA, 19 nt, synthetic construct
  source 1..19: mol_type = other RNA
gcttgtaaagaggtttcta

SEQ ID NO: 1221 - RNA, 19 nt, synthetic construct
  source 1..19: mol_type = other RNA
acaggattaggactgaagc

SEQ ID NO: 1222 - RNA, 19 nt, synthetic construct
  source 1..19: mol_type = other RNA
ggattaggactgaagcgat

SEQ ID NO: 1223 - RNA, 19 nt, synthetic construct
  source 1..19: mol_type = other RNA
gaagttcttgtgccctgct

SEQ ID NO: 1224 - RNA, 19 nt, synthetic construct
  source 1..19: mol_type = other RNA
aagctgctgactcacttta

SEQ ID NO: 1225 - RNA, 19 nt, synthetic construct
  source 1..19: mol_type = other RNA
agctgctgactcactttat

SEQ ID NO: 1226 - RNA, 19 nt, synthetic construct
  source 1..19: mol_type = other RNA
ctgctgactcactttatca

SEQ ID NO: 1227 - RNA, 19 nt, synthetic construct
  source 1..19: mol_type = other RNA
gctgactcactttatcaat

SEQ ID NO: 1228 - RNA, 19 nt, synthetic construct
  source 1..19: mol_type = other RNA
ctgactcactttatcaata

SEQ ID NO: 1229 - RNA, 19 nt, synthetic construct
  source 1..19: mol_type = other RNA
tgactcactttatcaatag

SEQ ID NO: 1230 - RNA, 19 nt, synthetic construct
  source 1..19: mol_type = other RNA
gactcactttatcaatagt

SEQ ID NO: 1231 - RNA, 19 nt, synthetic construct
  source 1..19: mol_type = other RNA
actcactttatcaatagtt

SEQ ID NO: 1232 - RNA, 19 nt, synthetic construct
  source 1..19: mol_type = other RNA
ctcactttatcaatagttc

SEQ ID NO: 1233 - RNA, 19 nt, synthetic construct
  source 1..19: mol_type = other RNA
ggtgagactgtatcctgtt

SEQ ID NO: 1234 - RNA, 19 nt, synthetic construct
  source 1..19: mol_type = other RNA
gtgagactgtatcctgttt

SEQ ID NO: 1235 - RNA, 19 nt, synthetic construct
  source 1..19: mol_type = other RNA
tgagactgtatcctgtttg

SEQ ID NO: 1236 - RNA, 19 nt, synthetic construct
  source 1..19: mol_type = other RNA
gagactgtatcctgtttgc

SEQ ID NO: 1237 - RNA, 19 nt, synthetic construct
  source 1..19: mol_type = other RNA
agactgtatcctgtttgct

SEQ ID NO: 1238 - RNA, 19 nt, synthetic construct
  source 1..19: mol_type = other RNA
gactgtatcctgtttgcta

SEQ ID NO: 1239 - RNA, 19 nt, synthetic construct
  source 1..19: mol_type = other RNA
actgtatcctgtttgctat

SEQ ID NO: 1240 - RNA, 19 nt, synthetic construct
  source 1..19: mol_type = other RNA
ctgtatcctgtttgctatt

SEQ ID NO: 1241 - RNA, 19 nt, synthetic construct
  source 1..19: mol_type = other RNA
tgtatcctgtttgctattg

SEQ ID NO: 1242 - RNA, 19 nt, synthetic construct
  source 1..19: mol_type = other RNA
gtatcctgtttgctattgc

SEQ ID NO: 1243 - RNA, 19 nt, synthetic construct
  source 1..19: mol_type = other RNA
atcctgtttgctattgctt

SEQ ID NO: 1244 - RNA, 19 nt, synthetic construct
  source 1..19: mol_type = other RNA
gcctcgtaacccttttcat

SEQ ID NO: 1245 - RNA, 19 nt, synthetic construct
  source 1..19: mol_type = other RNA
gagtttgccatgttgagca

SEQ ID NO: 1246 - RNA, 19 nt, synthetic construct
  source 1..19: mol_type = other RNA
agtttgccatgttgagcag

SEQ ID NO: 1247 - RNA, 19 nt, synthetic construct
  source 1..19: mol_type = other RNA
tttgccatgttgagcagga

SEQ ID NO: 1248 - RNA, 19 nt, synthetic construct
  source 1..19: mol_type = other RNA
ccatgatttcttcggtaat

SEQ ID NO: 1249 - RNA, 19 nt, synthetic construct
  source 1..19: mol_type = other RNA
gctttctgtctgtgaatgt

SEQ ID NO: 1250 - RNA, 19 nt, synthetic construct
  source 1..19: mol_type = other RNA
ctttctgtctgtgaatgtc

SEQ ID NO: 1251 - RNA, 19 nt, synthetic construct
  source 1..19: mol_type = other RNA
gtctgtgaatgtctatata

SEQ ID NO: 1252 - RNA, 19 nt, synthetic construct
  source 1..19: mol_type = other RNA
tctgtgaatgtctatatag

SEQ ID NO: 1253 - RNA, 19 nt, synthetic construct
  source 1..19: mol_type = other RNA
ctgtgaatgtctatatagt

SEQ ID NO: 1254 - RNA, 19 nt, synthetic construct
  source 1..19: mol_type = other RNA
tgtgaatgtctatatagtg

SEQ ID NO: 1255 - RNA, 19 nt, synthetic construct
  source 1..19: mol_type = other RNA
gtgaatgtctatatagtgt

SEQ ID NO: 1256 - RNA, 19 nt, synthetic construct
  source 1..19: mol_type = other RNA
tgaatgtctatatagtgta

SEQ ID NO: 1257 - RNA, 19 nt, synthetic construct
  source 1..19: mol_type = other RNA
aatgtctatatagtgtatt

SEQ ID NO: 1258 - RNA, 19 nt, synthetic construct
  source 1..19: mol_type = other RNA
gtctatatagtgtattgtg

SEQ ID NO: 1259 - RNA, 19 nt, synthetic construct
  source 1..19: mol_type = other RNA
tctatatagtgtattgtgt

SEQ ID NO: 1260 - RNA, 19 nt, synthetic construct
  source 1..19: mol_type = other RNA
ctatatagtgtattgtgtg

SEQ ID NO: 1261 - RNA, 19 nt, synthetic construct
  source 1..19: mol_type = other RNA
tatatagtgtattgtgtgt

SEQ ID NO: 1262 - RNA, 19 nt, synthetic construct
  source 1..19: mol_type = other RNA
atatagtgtattgtgtgtt

SEQ ID NO: 1263 - RNA, 19 nt, synthetic construct
  source 1..19: mol_type = other RNA
tatagtgtattgtgtgttt

SEQ ID NO: 1264 - RNA, 19 nt, synthetic construct
  source 1..19: mol_type = other RNA
atagtgtattgtgtgtttt

SEQ ID NO: 1265 - RNA, 19 nt, synthetic construct
  source 1..19: mol_type = other RNA
tagtgtattgtgtgtttta

SEQ ID NO: 1266 - RNA, 19 nt, synthetic construct
  source 1..19: mol_type = other RNA
agtgtattgtgtgttttaa

SEQ ID NO: 1267 - RNA, 19 nt, synthetic construct
  source 1..19: mol_type = other RNA
gtgtattgtgtgttttaac

SEQ ID NO: 1268 - RNA, 19 nt, synthetic construct
  source 1..19: mol_type = other RNA
tgtattgtgtgttttaaca

SEQ ID NO: 1269 - RNA, 19 nt, synthetic construct
  source 1..19: mol_type = other RNA
gtattgtgtgttttaacaa

SEQ ID NO: 1270 - RNA, 19 nt, synthetic construct
  source 1..19: mol_type = other RNA
tattgtgtgttttaacaaa

SEQ ID NO: 1271 - RNA, 19 nt, synthetic construct
  source 1..19: mol_type = other RNA
attgtgtgttttaacaaat

SEQ ID NO: 1272 - RNA, 19 nt, synthetic construct
  source 1..19: mol_type = other RNA
ttgtgtgttttaacaaatg

SEQ ID NO: 1273 - RNA, 19 nt, synthetic construct
  source 1..19: mol_type = other RNA
tgtgtgttttaacaaatga

SEQ ID NO: 1274 - RNA, 19 nt, synthetic construct
  source 1..19: mol_type = other RNA
gtgtgttttaacaaatgat

SEQ ID NO: 1275 - RNA, 19 nt, synthetic construct
  source 1..19: mol_type = other RNA
tgtgttttaacaaatgatt

SEQ ID NO: 1276 - RNA, 19 nt, synthetic construct
  source 1..19: mol_type = other RNA
gtgttttaacaaatgattt

SEQ ID NO: 1277 - RNA, 19 nt, synthetic construct
  source 1..19: mol_type = other RNA
tgttttaacaaatgattta

SEQ ID NO: 1278 - RNA, 19 nt, synthetic construct
  source 1..19: mol_type = other RNA
gttttaacaaatgatttac

SEQ ID NO: 1279 - RNA, 19 nt, synthetic construct
  source 1..19: mol_type = other RNA
ttttaacaaatgatttaca

SEQ ID NO: 1280 - RNA, 19 nt, synthetic construct
  source 1..19: mol_type = other RNA
taacaaatgatttacactg

SEQ ID NO: 1281 - RNA, 19 nt, synthetic construct
  source 1..19: mol_type = other RNA
aacaaatgatttacactga

SEQ ID NO: 1282 - RNA, 19 nt, synthetic construct
  source 1..19: mol_type = other RNA
acaaatgatttacactgac

SEQ ID NO: 1283 - RNA, 19 nt, synthetic construct
  source 1..19: mol_type = other RNA
caaatgatttacactgact

SEQ ID NO: 1284 - RNA, 19 nt, synthetic construct
  source 1..19: mol_type = other RNA
aatgatttacactgactgt

SEQ ID NO: 1285 - RNA, 19 nt, synthetic construct
  source 1..19: mol_type = other RNA
atgatttacactgactgtt

SEQ ID NO: 1286 - RNA, 19 nt, synthetic construct
  source 1..19: mol_type = other RNA
tgatttacactgactgttg

SEQ ID NO: 1287 - RNA, 19 nt, synthetic construct
  source 1..19: mol_type = other RNA
gatttacactgactgttgc

SEQ ID NO: 1288 - RNA, 19 nt, synthetic construct
  source 1..19: mol_type = other RNA
atttacactgactgttgct

SEQ ID NO: 1289 - RNA, 19 nt, synthetic construct
  source 1..19: mol_type = other RNA
tgactgttgctgtaaaagt

SEQ ID NO: 1290 - RNA, 19 nt, synthetic construct
  source 1..19: mol_type = other RNA
ctgttgctgtaaaagtgaa

SEQ ID NO: 1291 - RNA, 19 nt, synthetic construct
  source 1..19: mol_type = other RNA
tgttgctgtaaaagtgaat

SEQ ID NO: 1292 - RNA, 19 nt, synthetic construct
  source 1..19: mol_type = other RNA
ttgctgtaaaagtgaattt

SEQ ID NO: 1293 - RNA, 19 nt, synthetic construct
  source 1..19: mol_type = other RNA
tgctgtaaaagtgaatttg

SEQ ID NO: 1294 - RNA, 19 nt, synthetic construct
  source 1..19: mol_type = other RNA
gctgtaaaagtgaatttgg

SEQ ID NO: 1295 - RNA, 19 nt, synthetic construct
  source 1..19: mol_type = other RNA
ctgtaaaagtgaatttgga

SEQ ID NO: 1296 - RNA, 19 nt, synthetic construct
  source 1..19: mol_type = other RNA
gctggtgcttcaggttctc

SEQ ID NO: 1297 - RNA, 19 nt, synthetic construct
  source 1..19: mol_type = other RNA
ggctggtgcttcaggttct

SEQ ID NO: 1298 - RNA, 19 nt, synthetic construct
  source 1..19: mol_type = other RNA
agccacacttggaggtcac

SEQ ID NO: 1299 - RNA, 19 nt, synthetic construct
  source 1..19: mol_type = other RNA
ttccacctggccacctcct

SEQ ID NO: 1300 - RNA, 19 nt, synthetic construct
  source 1..19: mol_type = other RNA
acttccacctggccacctc

SEQ ID NO: 1301 - RNA, 19 nt, synthetic construct
  source 1..19: mol_type = other RNA
tacttccacctggccacct

SEQ ID NO: 1302 - RNA, 19 nt, synthetic construct
  source 1..19: mol_type = other RNA
ttacttccacctggccacc

SEQ ID NO: 1303 - RNA, 19 nt, synthetic construct
  source 1..19: mol_type = other RNA
tttacttccacctggccac

SEQ ID NO: 1304 - RNA, 19 nt, synthetic construct
  source 1..19: mol_type = other RNA
ttttacttccacctggcca

SEQ ID NO: 1305 - RNA, 19 nt, synthetic construct
  source 1..19: mol_type = other RNA
attttacttccacctggcc

SEQ ID NO: 1306 - RNA, 19 nt, synthetic construct
  source 1..19: mol_type = other RNA
gattttacttccacctggc

SEQ ID NO: 1307 - RNA, 19 nt, synthetic construct
  source 1..19: mol_type = other RNA
gcttgtgggtttcaatctt

SEQ ID NO: 1308 - RNA, 19 nt, synthetic construct
  source 1..19: mol_type = other RNA
agcttgtgggtttcaatct

SEQ ID NO: 1309 - RNA, 19 nt, synthetic construct
  source 1..19: mol_type = other RNA
cagcttgtgggtttcaatc

SEQ ID NO: 1310 - RNA, 19 nt, synthetic construct
  source 1..19: mol_type = other RNA
tcagcttgtgggtttcaat

SEQ ID NO: 1311 - RNA, 19 nt, synthetic construct
  source 1..19: mol_type = other RNA
gtcagcttgtgggtttcaa

SEQ ID NO: 1312 - RNA, 19 nt, synthetic construct
  source 1..19: mol_type = other RNA
ggtcagcttgtgggtttca

SEQ ID NO: 1313 - RNA, 19 nt, synthetic construct
  source 1..19: mol_type = other RNA
aggtcagcttgtgggtttc

SEQ ID NO: 1314 - RNA, 19 nt, synthetic construct
  source 1..19: mol_type = other RNA
aaggtcagcttgtgggttt

SEQ ID NO: 1315 - RNA, 19 nt, synthetic construct
  source 1..19: mol_type = other RNA
gaaggtcagcttgtgggtt

SEQ ID NO: 1316 - RNA, 19 nt, synthetic construct
  source 1..19: mol_type = other RNA
ggtctgtcttggctttggc

SEQ ID NO: 1317 - RNA, 19 nt, synthetic construct
  source 1..19: mol_type = other RNA
tggtctgtcttggctttgg

SEQ ID NO: 1318 - RNA, 19 nt, synthetic construct
  source 1..19: mol_type = other RNA
gcacaagtccttacaaaga

SEQ ID NO: 1319 - RNA, 19 nt, synthetic construct
  source 1..19: mol_type = other RNA
ggcacaagtccttacaaag

SEQ ID NO: 1320 - RNA, 19 nt, synthetic construct
  source 1..19: mol_type = other RNA
aggcacaagtccttacaaa

SEQ ID NO: 1321 - RNA, 19 nt, synthetic construct
  source 1..19: mol_type = other RNA
aagaggcacaagtccttac

SEQ ID NO: 1322 - RNA, 19 nt, synthetic construct
  source 1..19: mol_type = other RNA
caagaggcacaagtcctta

SEQ ID NO: 1323 - RNA, 19 nt, synthetic construct
  source 1..19: mol_type = other RNA
ccaagaggcacaagtcctt

SEQ ID NO: 1324 - RNA, 19 nt, synthetic construct
  source 1..19: mol_type = other RNA
agacaaatccaactacaac

SEQ ID NO: 1325 - RNA, 19 nt, synthetic construct
  source 1..19: mol_type = other RNA
cagacaaatccaactacaa

SEQ ID NO: 1326 - RNA, 19 nt, synthetic construct
  source 1..19: mol_type = other RNA
acagacaaatccaactaca

SEQ ID NO: 1327 - RNA, 19 nt, synthetic construct
  source 1..19: mol_type = other RNA
aacagacaaatccaactac

SEQ ID NO: 1328 - RNA, 19 nt, synthetic construct
  source 1..19: mol_type = other RNA
aaacagacaaatccaacta

SEQ ID NO: 1329 - RNA, 19 nt, synthetic construct
  source 1..19: mol_type = other RNA
tcatagtcactctggtgaa

SEQ ID NO: 1330 - RNA, 19 nt, synthetic construct
  source 1..19: mol_type = other RNA
atcatagtcactctggtga

SEQ ID NO: 1331 - RNA, 19 nt, synthetic construct
  source 1..19: mol_type = other RNA
tatcatagtcactctggtg

SEQ ID NO: 1332 - RNA, 19 nt, synthetic construct
  source 1..19: mol_type = other RNA
ctatcatagtcactctggt

SEQ ID NO: 1333 - RNA, 19 nt, synthetic construct
  source 1..19: mol_type = other RNA
actatcatagtcactctgg

SEQ ID NO: 1334 - RNA, 19 nt, synthetic construct
  source 1..19: mol_type = other RNA
cactatcatagtcactctg

SEQ ID NO: 1335 - RNA, 19 nt, synthetic construct
  source 1..19: mol_type = other RNA
tcactatcatagtcactct

SEQ ID NO: 1336 - RNA, 19 nt, synthetic construct
  source 1..19: mol_type = other RNA
ttcactatcatagtcactc

SEQ ID NO: 1337 - RNA, 19 nt, synthetic construct
  source 1..19: mol_type = other RNA
tttcactatcatagtcact

SEQ ID NO: 1338 - RNA, 19 nt, synthetic construct
  source 1..19: mol_type = other RNA
ttttcactatcatagtcac

SEQ ID NO: 1339 - RNA, 19 nt, synthetic construct
  source 1..19: mol_type = other RNA
cttttcactatcatagtca

SEQ ID NO: 1340 - RNA, 19 nt, synthetic construct
  source 1..19: mol_type = other RNA
tcttttcactatcatagtc

SEQ ID NO: 1341 - RNA, 19 nt, synthetic construct
  source 1..19: mol_type = other RNA
ttcttttcactatcatagt

SEQ ID NO: 1342 - RNA, 19 nt, synthetic construct
  source 1..19: mol_type = other RNA
tttcttttcactatcatag

SEQ ID NO: 1343 - RNA, 19 nt, synthetic construct
  source 1..19: mol_type = other RNA
ttttcttttcactatcata

SEQ ID NO: 1344 - RNA, 19 nt, synthetic construct
  source 1..19: mol_type = other RNA
tacatgcgtcctttttttt

SEQ ID NO: 1345 - RNA, 19 nt, synthetic construct
  source 1..19: mol_type = other RNA
atacatgcgtccttttttt

SEQ ID NO: 1346 - RNA, 19 nt, synthetic construct
  source 1..19: mol_type = other RNA
gatacatgcgtcctttttt

SEQ ID NO: 1347 - RNA, 19 nt, synthetic construct
  source 1..19: mol_type = other RNA
agatacatgcgtccttttt

SEQ ID NO: 1348 - RNA, 19 nt, synthetic construct
  source 1..19: mol_type = other RNA
aagatacatgcgtcctttt

SEQ ID NO: 1349 - RNA, 19 nt, synthetic construct
  source 1..19: mol_type = other RNA
caagatacatgcgtccttt

SEQ ID NO: 1350 - RNA, 19 nt, synthetic construct
  source 1..19: mol_type = other RNA
tcaagatacatgcgtcctt

SEQ ID NO: 1351 - RNA, 19 nt, synthetic construct
  source 1..19: mol_type = other RNA
ttcaagatacatgcgtcct

SEQ ID NO: 1352 - RNA, 19 nt, synthetic construct
  source 1..19: mol_type = other RNA
tttcaagatacatgcgtcc

SEQ ID NO: 1353 - RNA, 19 nt, synthetic construct
  source 1..19: mol_type = other RNA
atttcaagatacatgcgtc

SEQ ID NO: 1354 - RNA, 19 nt, synthetic construct
  source 1..19: mol_type = other RNA
ggaactattgataaagtga

SEQ ID NO: 1355 - RNA, 19 nt, synthetic construct
  source 1..19: mol_type = other RNA
tggaactattgataaagtg

SEQ ID NO: 1356 - RNA, 19 nt, synthetic construct
  source 1..19: mol_type = other RNA
atggaactattgataaagt

SEQ ID NO: 1357 - RNA, 19 nt, synthetic construct
  source 1..19: mol_type = other RNA
aatggaactattgataaag

SEQ ID NO: 1358 - RNA, 19 nt, synthetic construct
  source 1..19: mol_type = other RNA
aaatggaactattgataaa

SEQ ID NO: 1359 - RNA, 19 nt, synthetic construct
  source 1..19: mol_type = other RNA
taaatggaactattgataa

SEQ ID NO: 1360 - RNA, 19 nt, synthetic construct
  source 1..19: mol_type = other RNA
ttaaatggaactattgata

SEQ ID NO: 1361 - RNA, 19 nt, synthetic construct
  source 1..19: mol_type = other RNA
tttaaatggaactattgat

SEQ ID NO: 1362 - RNA, 19 nt, synthetic construct
  source 1..19: mol_type = other RNA
atttaaatggaactattga

SEQ ID NO: 1363 - RNA, 19 nt, synthetic construct
  source 1..19: mol_type = other RNA
aatttaaatggaactattg

SEQ ID NO: 1364 - RNA, 19 nt, synthetic construct
  source 1..19: mol_type = other RNA
caatttaaatggaactatt

SEQ ID NO: 1365 - RNA, 19 nt, synthetic construct
  source 1..19: mol_type = other RNA
tcaatttaaatggaactat

SEQ ID NO: 1366 - RNA, 19 nt, synthetic construct
  source 1..19: mol_type = other RNA
gtcaatttaaatggaacta

SEQ ID NO: 1367 - RNA, 19 nt, synthetic construct
  source 1..19: mol_type = other RNA
agtcaatttaaatggaact

SEQ ID NO: 1368 - RNA, 19 nt, synthetic construct
  source 1..19: mol_type = other RNA
aagtcaatttaaatggaac

SEQ ID NO: 1369 - RNA, 19 nt, synthetic construct
  source 1..19: mol_type = other RNA
gaagtcaatttaaatggaa

SEQ ID NO: 1370 - RNA, 19 nt, synthetic construct
  source 1..19: mol_type = other RNA
tgaagtcaatttaaatgga

SEQ ID NO: 1371 - RNA, 19 nt, synthetic construct
  source 1..19: mol_type = other RNA
aaatcatgggacttgcaag

SEQ ID NO: 1372 - RNA, 19 nt, synthetic construct
  source 1..19: mol_type = other RNA
gaaatcatgggacttgcaa

SEQ ID NO: 1373 - RNA, 19 nt, synthetic construct
  source 1..19: mol_type = other RNA
agaaatcatgggacttgca

SEQ ID NO: 1374 - RNA, 19 nt, synthetic construct
  source 1..19: mol_type = other RNA
aagaaatcatgggacttgc

SEQ ID NO: 1375 - RNA, 19 nt, synthetic construct
  source 1..19: mol_type = other RNA
tttccaaattcacttttac

SEQ ID NO: 1376 - RNA, 19 nt, synthetic construct
  source 1..19: mol_type = other RNA
atttccaaattcactttta

SEQ ID NO: 1377 - RNA, 19 nt, synthetic construct
  source 1..19: mol_type = other RNA
tatttccaaattcactttt

SEQ ID NO: 1378 - RNA, 19 nt, synthetic construct
  source 1..19: mol_type = other RNA
ttatttccaaattcacttt

SEQ ID NO: 1379 - RNA, 19 nt, synthetic construct
  source 1..19: mol_type = other RNA
tttatttccaaattcactt

SEQ ID NO: 1380 - RNA, 19 nt, synthetic construct
  source 1..19: mol_type = other RNA
ctttatttccaaattcact

SEQ ID NO: 1381 - RNA, 19 nt, synthetic construct
  source 1..19: mol_type = other RNA
actttatttccaaattcac

SEQ ID NO: 1382 - RNA, 19 nt, synthetic construct
  source 1..19: mol_type = other RNA
aactttatttccaaattca

SEQ ID NO: 1383 - RNA, 19 nt, synthetic construct
  source 1..19: mol_type = other RNA
taactttatttccaaattc

SEQ ID NO: 1384 - RNA, 19 nt, synthetic construct
  source 1..19: mol_type = other RNA
ataactttatttccaaatt

SEQ ID NO: 1385 - RNA, 19 nt, synthetic construct
  source 1..19: mol_type = other RNA
aataactttatttccaaat

SEQ ID NO: 1386 - RNA, 19 nt, synthetic construct
  source 1..19: mol_type = other RNA
taataactttatttccaaa

SEQ ID NO: 1387 - RNA, 19 nt, synthetic construct
  source 1..19: mol_type = other RNA
gtaataactttatttccaa

SEQ ID NO: 1388 - RNA, 19 nt, synthetic construct
  source 1..19: mol_type = other RNA
agtaataactttatttcca

SEQ ID NO: 1389 - RNA, 19 nt, synthetic construct
  source 1..19: mol_type = other RNA
gagtaataactttatttcc

SEQ ID NO: 1390 - RNA, 19 nt, synthetic construct
  source 1..19: mol_type = other RNA
agagtaataactttatttc

SEQ ID NO: 1391 - RNA, 19 nt, synthetic construct
  source 1..19: mol_type = other RNA
cagagtaataactttattt

SEQ ID NO: 1392 - RNA, 19 nt, synthetic construct
  source 1..19: mol_type = other RNA
tccatcacttcgaactcct

SEQ ID NO: 1393 - RNA, 19 nt, synthetic construct
  source 1..19: mol_type = other RNA
ttccatcacttcgaactcc

SEQ ID NO: 1394 - RNA, 19 nt, synthetic construct
  source 1..19: mol_type = other RNA
cttccatcacttcgaactc

SEQ ID NO: 1395 - RNA, 19 nt, synthetic construct
  source 1..19: mol_type = other RNA
atcttccatcacttcgaac

SEQ ID NO: 1396 - RNA, 19 nt, synthetic construct
  source 1..19: mol_type = other RNA
tgatcttccatcacttcga

SEQ ID NO: 1397 - RNA, 19 nt, synthetic construct
  source 1..19: mol_type = other RNA
cagcgtgatcttccatcac

SEQ ID NO: 1398 - RNA, 19 nt, synthetic construct
  source 1..19: mol_type = other RNA
tgtcccccaacccgtacgt

SEQ ID NO: 1399 - RNA, 19 nt, synthetic construct
  source 1..19: mol_type = other RNA
tttcctgtcccccaacccg

SEQ ID NO: 1400 - RNA, 19 nt, synthetic construct
  source 1..19: mol_type = other RNA
tgtcaccctcttggtcttg

SEQ ID NO: 1401 - RNA, 19 nt, synthetic construct
  source 1..19: mol_type = other RNA
accagcagcttcgtcttcc

SEQ ID NO: 1402 - RNA, 19 nt, synthetic construct
  source 1..19: mol_type = other RNA
gaccagcagcttcgtcttc

SEQ ID NO: 1403 - RNA, 19 nt, synthetic construct
  source 1..19: mol_type = other RNA
tgaccagcagcttcgtctt

SEQ ID NO: 1404 - RNA, 19 nt, synthetic construct
  source 1..19: mol_type = other RNA
acgtgaccagcagcttcgt

SEQ ID NO: 1405 - RNA, 19 nt, synthetic construct
  source 1..19: mol_type = other RNA
tcacgtgaccagcagcttc

SEQ ID NO: 1406 - RNA, 19 nt, synthetic construct
  source 1..19: mol_type = other RNA
gtcacgtgaccagcagctt

SEQ ID NO: 1407 - RNA, 19 nt, synthetic construct
  source 1..19: mol_type = other RNA
tgcttttactgaccatgcg

SEQ ID NO: 1408 - RNA, 19 nt, synthetic construct
  source 1..19: mol_type = other RNA
ttgcttttactgaccatgc

SEQ ID NO: 1409 - RNA, 19 nt, synthetic construct
  source 1..19: mol_type = other RNA
tctttgcttttactgacca

SEQ ID NO: 1410 - RNA, 19 nt, synthetic construct
  source 1..19: mol_type = other RNA
gtctttgcttttactgacc

SEQ ID NO: 1411 - RNA, 19 nt, synthetic construct
  source 1..19: mol_type = other RNA
cgtctttgcttttactgac

SEQ ID NO: 1412 - RNA, 19 nt, synthetic construct
  source 1..19: mol_type = other RNA
tcccgtctttgcttttact

SEQ ID NO: 1413 - RNA, 19 nt, synthetic construct
  source 1..19: mol_type = other RNA
gtcccgtctttgcttttac

SEQ ID NO: 1414 - RNA, 19 nt, synthetic construct
  source 1..19: mol_type = other RNA
gcttccagtcccgtctttg

SEQ ID NO: 1415 - RNA, 19 nt, synthetic construct
  source 1..19: mol_type = other RNA
tcgcttccagtcccgtctt

SEQ ID NO: 1416 - RNA, 19 nt, synthetic construct
  source 1..19: mol_type = other RNA
atcgcttccagtcccgtct

SEQ ID NO: 1417 - RNA, 19 nt, synthetic construct
  source 1..19: mol_type = other RNA
gtcatcgcttccagtcccg

SEQ ID NO: 1418 - RNA, 19 nt, synthetic construct
  source 1..19: mol_type = other RNA
tgtcatcgcttccagtccc

SEQ ID NO: 1419 - RNA, 19 nt, synthetic construct
  source 1..19: mol_type = other RNA
ttgtcatcgcttccagtcc

SEQ ID NO: 1420 - RNA, 19 nt, synthetic construct
  source 1..19: mol_type = other RNA
ttttgtcatcgcttccagt

SEQ ID NO: 1421 - RNA, 19 nt, synthetic construct
  source 1..19: mol_type = other RNA
tttttgtcatcgcttccag

SEQ ID NO: 1422 - RNA, 19 nt, synthetic construct
  source 1..19: mol_type = other RNA
ttttttgtcatcgcttcca

SEQ ID NO: 1423 - RNA, 19 nt, synthetic construct
  source 1..19: mol_type = other RNA
cttttttgtcatcgcttcc

SEQ ID NO: 1424 - RNA, 19 nt, synthetic construct
  source 1..19: mol_type = other RNA
gcttttttgtcatcgcttc

SEQ ID NO: 1425 - RNA, 19 nt, synthetic construct
  source 1..19: mol_type = other RNA
ggcttttttgtcatcgctt

SEQ ID NO: 1426 - RNA, 19 nt, synthetic construct
  source 1..19: mol_type = other RNA
tggcttttttgtcatcgct

SEQ ID NO: 1427 - RNA, 19 nt, synthetic construct
  source 1..19: mol_type = other RNA
ttggcttttttgtcatcgc

SEQ ID NO: 1428 - RNA, 19 nt, synthetic construct
  source 1..19: mol_type = other RNA
cgatcttcgttttaccatc

SEQ ID NO: 1429 - RNA, 19 nt, synthetic construct
  source 1..19: mol_type = other RNA
ctggaatcctggtggcgtt

SEQ ID NO: 1430 - RNA, 19 nt, synthetic construct
  source 1..19: mol_type = other RNA
cagagctgggtggtgtctt

SEQ ID NO: 1431 - RNA, 19 nt, synthetic construct
  source 1..19: mol_type = other RNA
atcccctgattttggaggt

SEQ ID NO: 1432 - RNA, 19 nt, synthetic construct
  source 1..19: mol_type = other RNA
ttcaggtctggcatgggca

SEQ ID NO: 1433 - RNA, 19 nt, synthetic construct
  source 1..19: mol_type = other RNA
tcttcaggtctggcatggg

SEQ ID NO: 1434 - RNA, 19 nt, synthetic construct
  source 1..19: mol_type = other RNA
ttcttcaggtctggcatgg

SEQ ID NO: 1435 - RNA, 19 nt, synthetic construct
  source 1..19: mol_type = other RNA
attcttcaggtctggcatg

SEQ ID NO: 1436 - RNA, 19 nt, synthetic construct
  source 1..19: mol_type = other RNA
acttgacattcttcaggtc

SEQ ID NO: 1437 - RNA, 19 nt, synthetic construct
  source 1..19: mol_type = other RNA
gacttgacattcttcaggt

SEQ ID NO: 1438 - RNA, 19 nt, synthetic construct
  source 1..19: mol_type = other RNA
ggacttgacattcttcagg

SEQ ID NO: 1439 - RNA, 19 nt, synthetic construct
  source 1..19: mol_type = other RNA
tggacttgacattcttcag

SEQ ID NO: 1440 - RNA, 19 nt, synthetic construct
  source 1..19: mol_type = other RNA
ttggacttgacattcttca

SEQ ID NO: 1441 - RNA, 19 nt, synthetic construct
  source 1..19: mol_type = other RNA
agccgatcttggacttgac

SEQ ID NO: 1442 - RNA, 19 nt, synthetic construct
  source 1..19: mol_type = other RNA
tgcttcaggttctcagtgg

SEQ ID NO: 1443 - RNA, 19 nt, synthetic construct
  source 1..19: mol_type = other RNA
gtgcttcaggttctcagtg

SEQ ID NO: 1444 - RNA, 19 nt, synthetic construct
  source 1..19: mol_type = other RNA
tggtttgtagactatttgc

SEQ ID NO: 1445 - RNA, 19 nt, synthetic construct
  source 1..19: mol_type = other RNA
ctggtttgtagactatttg

SEQ ID NO: 1446 - RNA, 19 nt, synthetic construct
  source 1..19: mol_type = other RNA
actggtttgtagactattt

SEQ ID NO: 1447 - RNA, 19 nt, synthetic construct
  source 1..19: mol_type = other RNA
aactggtttgtagactatt

SEQ ID NO: 1448 - RNA, 19 nt, synthetic construct
  source 1..19: mol_type = other RNA
caactggtttgtagactat

SEQ ID NO: 1449 - RNA, 19 nt, synthetic construct
  source 1..19: mol_type = other RNA
tcaactggtttgtagacta

SEQ ID NO: 1450 - RNA, 19 nt, synthetic construct
  source 1..19: mol_type = other RNA
gtcaactggtttgtagact

SEQ ID NO: 1451 - RNA, 19 nt, synthetic construct
  source 1..19: mol_type = other RNA
ggtcaactggtttgtagac

SEQ ID NO: 1452 - RNA, 19 nt, synthetic construct
  source 1..19: mol_type = other RNA
aggtcaactggtttgtaga

SEQ ID NO: 1453 - RNA, 19 nt, synthetic construct
  source 1..19: mol_type = other RNA
caggtcaactggtttgtag

SEQ ID NO: 1454 - RNA, 19 nt, synthetic construct
  source 1..19: mol_type = other RNA
tcaggtcaactggtttgta

SEQ ID NO: 1455 - RNA, 19 nt, synthetic construct
  source 1..19: mol_type = other RNA
ctcaggtcaactggtttgt

SEQ ID NO: 1456 - RNA, 19 nt, synthetic construct
  source 1..19: mol_type = other RNA
gctcaggtcaactggtttg

SEQ ID NO: 1457 - RNA, 19 nt, synthetic construct
  source 1..19: mol_type = other RNA
tgctcaggtcaactggttt

SEQ ID NO: 1458 - RNA, 19 nt, synthetic construct
  source 1..19: mol_type = other RNA
ttgctcaggtcaactggtt

SEQ ID NO: 1459 - RNA, 19 nt, synthetic construct
  source 1..19: mol_type = other RNA
cttgctcaggtcaactggt

SEQ ID NO: 1460 - RNA, 19 nt, synthetic construct
  source 1..19: mol_type = other RNA
accttgctcaggtcaactg

SEQ ID NO: 1461 - RNA, 19 nt, synthetic construct
  source 1..19: mol_type = other RNA
tcaccttgctcaggtcaac

SEQ ID NO: 1462 - RNA, 19 nt, synthetic construct
  source 1..19: mol_type = other RNA
gtcaccttgctcaggtcaa

SEQ ID NO: 1463 - RNA, 19 nt, synthetic construct
  source 1..19: mol_type = other RNA
aggtcaccttgctcaggtc

SEQ ID NO: 1464 - RNA, 19 nt, synthetic construct
  source 1..19: mol_type = other RNA
tggaggtcaccttgctcag

SEQ ID NO: 1465 - RNA, 19 nt, synthetic construct
  source 1..19: mol_type = other RNA
acacttggaggtcaccttg

SEQ ID NO: 1466 - RNA, 19 nt, synthetic construct
  source 1..19: mol_type = other RNA
cacacttggaggtcacctt

SEQ ID NO: 1467 - RNA, 19 nt, synthetic construct
  source 1..19: mol_type = other RNA
ccacacttggaggtcacct

SEQ ID NO: 1468 - RNA, 19 nt, synthetic construct
  source 1..19: mol_type = other RNA
taatgagccacacttggag

SEQ ID NO: 1469 - RNA, 19 nt, synthetic construct
  source 1..19: mol_type = other RNA
atgttgcctaatgagccac

SEQ ID NO: 1470 - RNA, 19 nt, synthetic construct
  source 1..19: mol_type = other RNA
gatgttgcctaatgagcca

SEQ ID NO: 1471 - RNA, 19 nt, synthetic construct
  source 1..19: mol_type = other RNA
tggatgttgcctaatgagc

SEQ ID NO: 1472 - RNA, 19 nt, synthetic construct
  source 1..19: mol_type = other RNA
atggatgttgcctaatgag

SEQ ID NO: 1473 - RNA, 19 nt, synthetic construct
  source 1..19: mol_type = other RNA
tgatggatgttgcctaatg

SEQ ID NO: 1474 - RNA, 19 nt, synthetic construct
  source 1..19: mol_type = other RNA
atgatggatgttgcctaat

SEQ ID NO: 1475 - RNA, 19 nt, synthetic construct
  source 1..19: mol_type = other RNA
tatgatggatgttgcctaa

SEQ ID NO: 1476 - RNA, 19 nt, synthetic construct
  source 1..19: mol_type = other RNA
tttatgatggatgttgcct

SEQ ID NO: 1477 - RNA, 19 nt, synthetic construct
  source 1..19: mol_type = other RNA
ctggtttatgatggatgtt

SEQ ID NO: 1478 - RNA, 19 nt, synthetic construct
  source 1..19: mol_type = other RNA
agattttacttccacctgg

SEQ ID NO: 1479 - RNA, 19 nt, synthetic construct
  source 1..19: mol_type = other RNA
cagattttacttccacctg

SEQ ID NO: 1480 - RNA, 19 nt, synthetic construct
  source 1..19: mol_type = other RNA
tcagattttacttccacct

SEQ ID NO: 1481 - RNA, 19 nt, synthetic construct
  source 1..19: mol_type = other RNA
ctcagattttacttccacc

SEQ ID NO: 1482 - RNA, 19 nt, synthetic construct
  source 1..19: mol_type = other RNA
tctcagattttacttccac

SEQ ID NO: 1483 - RNA, 19 nt, synthetic construct
  source 1..19: mol_type = other RNA
ttctcagattttacttcca

SEQ ID NO: 1484 - RNA, 19 nt, synthetic construct
  source 1..19: mol_type = other RNA
cttctcagattttacttcc

SEQ ID NO: 1485 - RNA, 19 nt, synthetic construct
  source 1..19: mol_type = other RNA
gcttctcagattttacttc

SEQ ID NO: 1486 - RNA, 19 nt, synthetic construct
  source 1..19: mol_type = other RNA
agcttctcagattttactt

SEQ ID NO: 1487 - RNA, 19 nt, synthetic construct
  source 1..19: mol_type = other RNA
aagcttctcagattttact

SEQ ID NO: 1488 - RNA, 19 nt, synthetic construct
  source 1..19: mol_type = other RNA
tgaagtcaagcttctcaga

SEQ ID NO: 1489 - RNA, 19 nt, synthetic construct
  source 1..19: mol_type = other RNA
ttgaagtcaagcttctcag

SEQ ID NO: 1490 - RNA, 19 nt, synthetic construct
  source 1..19: mol_type = other RNA
cttgaagtcaagcttctca

SEQ ID NO: 1491 - RNA, 19 nt, synthetic construct
  source 1..19: mol_type = other RNA
ccttgaagtcaagcttctc

SEQ ID NO: 1492 - RNA, 19 nt, synthetic construct
  source 1..19: mol_type = other RNA
tccttgaagtcaagcttct

SEQ ID NO: 1493 - RNA, 19 nt, synthetic construct
  source 1..19: mol_type = other RNA
gtccttgaagtcaagcttc

SEQ ID NO: 1494 - RNA, 19 nt, synthetic construct
  source 1..19: mol_type = other RNA
tgtccttgaagtcaagctt

SEQ ID NO: 1495 - RNA, 19 nt, synthetic construct
  source 1..19: mol_type = other RNA
ctgtccttgaagtcaagct

SEQ ID NO: 1496 - RNA, 19 nt, synthetic construct
  source 1..19: mol_type = other RNA
tctgtccttgaagtcaagc

SEQ ID NO: 1497 - RNA, 19 nt, synthetic construct
  source 1..19: mol_type = other RNA
ctctgtccttgaagtcaag

SEQ ID NO: 1498 - RNA, 19 nt, synthetic construct
  source 1..19: mol_type = other RNA
actctgtccttgaagtcaa

SEQ ID NO: 1499 - RNA, 19 nt, synthetic construct
  source 1..19: mol_type = other RNA
tcgactggactctgtcctt

SEQ ID NO: 1500 - RNA, 19 nt, synthetic construct
  source 1..19: mol_type = other RNA
ttcgactggactctgtcct

SEQ ID NO: 1501 - RNA, 19 nt, synthetic construct
  source 1..19: mol_type = other RNA
tgatattgtccagggaccc

SEQ ID NO: 1502 - RNA, 19 nt, synthetic construct
  source 1..19: mol_type = other RNA
tcaatctttttatttcctc

SEQ ID NO: 1503 - RNA, 19 nt, synthetic construct
  source 1..19: mol_type = other RNA
ttcaatctttttatttcct

SEQ ID NO: 1504 - RNA, 19 nt, synthetic construct
  source 1..19: mol_type = other RNA
tttcaatctttttatttcc

SEQ ID NO: 1505 - RNA, 19 nt, synthetic construct
  source 1..19: mol_type = other RNA
gtttcaatctttttatttc

SEQ ID NO: 1506 - RNA, 19 nt, synthetic construct
  source 1..19: mol_type = other RNA
ggtttcaatctttttattt

SEQ ID NO: 1507 - RNA, 19 nt, synthetic construct
  source 1..19: mol_type = other RNA
gggtttcaatctttttatt

SEQ ID NO: 1508 - RNA, 19 nt, synthetic construct
  source 1..19: mol_type = other RNA
tgggtttcaatctttttat

SEQ ID NO: 1509 - RNA, 19 nt, synthetic construct
  source 1..19: mol_type = other RNA
tgtgggtttcaatcttttt

SEQ ID NO: 1510 - RNA, 19 nt, synthetic construct
  source 1..19: mol_type = other RNA
ttgtgggtttcaatctttt

SEQ ID NO: 1511 - RNA, 19 nt, synthetic construct
  source 1..19: mol_type = other RNA
agacattgctgagatgccg

SEQ ID NO: 1512 - RNA, 19 nt, synthetic construct
  source 1..19: mol_type = other RNA
gagtctaccatgtcgatgc

SEQ ID NO: 1513 - RNA, 19 nt, synthetic construct
  source 1..19: mol_type = other RNA
acaaaccctgcttggccag

SEQ ID NO: 1514 - RNA, 19 nt, synthetic construct
  source 1..19: mol_type = other RNA
ctttttttttccacactct

SEQ ID NO: 1515 - RNA, 19 nt, synthetic construct
  source 1..19: mol_type = other RNA
tctttttttttccacactc

SEQ ID NO: 1516 - RNA, 19 nt, synthetic construct
  source 1..19: mol_type = other RNA
attctttttttttccacac

SEQ ID NO: 1517 - RNA, 19 nt, synthetic construct
  source 1..19: mol_type = other RNA
aaccaattaaccgaactgc

SEQ ID NO: 1518 - RNA, 19 nt, synthetic construct
  source 1..19: mol_type = other RNA
agaatcaaaaggaattgcc

SEQ ID NO: 1519 - RNA, 19 nt, synthetic construct
  source 1..19: mol_type = other RNA
tttcaaatcctttgttgct

SEQ ID NO: 1520 - RNA, 19 nt, synthetic construct
  source 1..19: mol_type = other RNA
caagtttcaaatcctttgt

SEQ ID NO: 1521 - RNA, 19 nt, synthetic construct
  source 1..19: mol_type = other RNA
accaagtttcaaatccttt

SEQ ID NO: 1522 - RNA, 19 nt, synthetic construct
  source 1..19: mol_type = other RNA
acaccaagtttcaaatcct

SEQ ID NO: 1523 - RNA, 19 nt, synthetic construct
  source 1..19: mol_type = other RNA
tcacacaaggttgacatcg

SEQ ID NO: 1524 - RNA, 19 nt, synthetic construct
  source 1..19: mol_type = other RNA
gacatcaaggtcagtcttt

SEQ ID NO: 1525 - RNA, 19 nt, synthetic construct
  source 1..19: mol_type = other RNA
aaacagggtttctgtggag

SEQ ID NO: 1526 - RNA, 19 nt, synthetic construct
  source 1..19: mol_type = other RNA
taaaacagggtttctgtgg

SEQ ID NO: 1527 - RNA, 19 nt, synthetic construct
  source 1..19: mol_type = other RNA
ataaaacagggtttctgtg

SEQ ID NO: 1528 - RNA, 19 nt, synthetic construct
  source 1..19: mol_type = other RNA
aataaaacagggtttctgt

SEQ ID NO: 1529 - RNA, 19 nt, synthetic construct
  source 1..19: mol_type = other RNA
caataaaacagggtttctg

SEQ ID NO: 1530 - RNA, 19 nt, synthetic construct
  source 1..19: mol_type = other RNA
tcaataaaacagggtttct

SEQ ID NO: 1531 - RNA, 19 nt, synthetic construct
  source 1..19: mol_type = other RNA
ctcaataaaacagggtttc

SEQ ID NO: 1532 - RNA, 19 nt, synthetic construct
  source 1..19: mol_type = other RNA
actcaataaaacagggttt

SEQ ID NO: 1533 - RNA, 19 nt, synthetic construct
  source 1..19: mol_type = other RNA
aactcaataaaacagggtt

SEQ ID NO: 1534 - RNA, 19 nt, synthetic construct
  source 1..19: mol_type = other RNA
gaactcaataaaacagggt

SEQ ID NO: 1535 - RNA, 19 nt, synthetic construct
  source 1..19: mol_type = other RNA
agaactcaataaaacaggg

SEQ ID NO: 1536 - RNA, 19 nt, synthetic construct
  source 1..19: mol_type = other RNA
cagaactcaataaaacagg

SEQ ID NO: 1537 - RNA, 19 nt, synthetic construct
  source 1..19: mol_type = other RNA
tcagaactcaataaaacag

SEQ ID NO: 1538 - RNA, 19 nt, synthetic construct
  source 1..19: mol_type = other RNA
ttcagaactcaataaaaca

SEQ ID NO: 1539 - RNA, 19 nt, synthetic construct
  source 1..19: mol_type = other RNA
ccttcagaactcaataaaa

SEQ ID NO: 1540 - RNA, 19 nt, synthetic construct
  source 1..19: mol_type = other RNA
aaccttcagaactcaataa

SEQ ID NO: 1541 - RNA, 19 nt, synthetic construct
  source 1..19: mol_type = other RNA
ccaaccttcagaactcaat

SEQ ID NO: 1542 - RNA, 19 nt, synthetic construct
  source 1..19: mol_type = other RNA
tccaaccttcagaactcaa

SEQ ID NO: 1543 - RNA, 19 nt, synthetic construct
  source 1..19: mol_type = other RNA
cttacaaagagaactggtt

SEQ ID NO: 1544 - RNA, 19 nt, synthetic construct
  source 1..19: mol_type = other RNA
ccttacaaagagaactggt

SEQ ID NO: 1545 - RNA, 19 nt, synthetic construct
  source 1..19: mol_type = other RNA
tccttacaaagagaactgg

SEQ ID NO: 1546 - RNA, 19 nt, synthetic construct
  source 1..19: mol_type = other RNA
gtccttacaaagagaactg

SEQ ID NO: 1547 - RNA, 19 nt, synthetic construct
  source 1..19: mol_type = other RNA
caccctcagtatggagtag

SEQ ID NO: 1548 - RNA, 19 nt, synthetic construct
  source 1..19: mol_type = other RNA
tcaccctcagtatggagta

SEQ ID NO: 1549 - RNA, 19 nt, synthetic construct
  source 1..19: mol_type = other RNA
ttcaccctcagtatggagt

SEQ ID NO: 1550 - RNA, 19 nt, synthetic construct
  source 1..19: mol_type = other RNA
tttcaccctcagtatggag

SEQ ID NO: 1551 - RNA, 19 nt, synthetic construct
  source 1..19: mol_type = other RNA
ttaatttcaccctcagtat

SEQ ID NO: 1552 - RNA, 19 nt, synthetic construct
  source 1..19: mol_type = other RNA
ttcccttaatttcaccctc

SEQ ID NO: 1553 - RNA, 19 nt, synthetic construct
  source 1..19: mol_type = other RNA
tcaacaaggcagaaacacc

SEQ ID NO: 1554 - RNA, 19 nt, synthetic construct
  source 1..19: mol_type = other RNA
atatgttcagctgctccag

SEQ ID NO: 1555 - RNA, 19 nt, synthetic construct
  source 1..19: mol_type = other RNA
tatatgttcagctgctcca

SEQ ID NO: 1556 - RNA, 19 nt, synthetic construct
  source 1..19: mol_type = other RNA
tgtatatgttcagctgctc

SEQ ID NO: 1557 - RNA, 19 nt, synthetic construct
  source 1..19: mol_type = other RNA
atgtatatgttcagctgct

SEQ ID NO: 1558 - RNA, 19 nt, synthetic construct
  source 1..19: mol_type = other RNA
tatgtatatgttcagctgc

SEQ ID NO: 1559 - RNA, 19 nt, synthetic construct
  source 1..19: mol_type = other RNA
ctatgtatatgttcagctg

SEQ ID NO: 1560 - RNA, 19 nt, synthetic construct
  source 1..19: mol_type = other RNA
tctatgtatatgttcagct

SEQ ID NO: 1561 - RNA, 19 nt, synthetic construct
  source 1..19: mol_type = other RNA
atctatgtatatgttcagc

SEQ ID NO: 1562 - RNA, 19 nt, synthetic construct
  source 1..19: mol_type = other RNA
aacatctatgtatatgttc

SEQ ID NO: 1563 - RNA, 19 nt, synthetic construct
  source 1..19: mol_type = other RNA
caacatctatgtatatgtt

SEQ ID NO: 1564 - RNA, 19 nt, synthetic construct
  source 1..19: mol_type = other RNA
acaaatccaactacaactc

SEQ ID NO: 1565 - RNA, 19 nt, synthetic construct
  source 1..19: mol_type = other RNA
gacaaatccaactacaact

SEQ ID NO: 1566 - RNA, 19 nt, synthetic construct
  source 1..19: mol_type = other RNA
taaacagacaaatccaact

SEQ ID NO: 1567 - RNA, 19 nt, synthetic construct
  source 1..19: mol_type = other RNA
ataaacagacaaatccaac

SEQ ID NO: 1568 - RNA, 19 nt, synthetic construct
  source 1..19: mol_type = other RNA
cataaacagacaaatccaa

SEQ ID NO: 1569 - RNA, 19 nt, synthetic construct
  source 1..19: mol_type = other RNA
agcataaacagacaaatcc

SEQ ID NO: 1570 - RNA, 19 nt, synthetic construct
  source 1..19: mol_type = other RNA
aagcataaacagacaaatc

SEQ ID NO: 1571 - RNA, 19 nt, synthetic construct
  source 1..19: mol_type = other RNA
caagcataaacagacaaat

SEQ ID NO: 1572 - RNA, 19 nt, synthetic construct
  source 1..19: mol_type = other RNA
ccaagcataaacagacaaa

SEQ ID NO: 1573 - RNA, 19 nt, synthetic construct
  source 1..19: mol_type = other RNA
tccaagcataaacagacaa

SEQ ID NO: 1574 - RNA, 19 nt, synthetic construct
  source 1..19: mol_type = other RNA
atccaagcataaacagaca

SEQ ID NO: 1575 - RNA, 19 nt, synthetic construct
  source 1..19: mol_type = other RNA
aatccaagcataaacagac

SEQ ID NO: 1576 - RNA, 19 nt, synthetic construct
  source 1..19: mol_type = other RNA
gaatccaagcataaacaga

SEQ ID NO: 1577 - RNA, 19 nt, synthetic construct
  source 1..19: mol_type = other RNA
tgaatccaagcataaacag

SEQ ID NO: 1578 - RNA, 19 nt, synthetic construct
  source 1..19: mol_type = other RNA
gtgaatccaagcataaaca

SEQ ID NO: 1579 - RNA, 19 nt, synthetic construct
  source 1..19: mol_type = other RNA
tggtgaatccaagcataaa

SEQ ID NO: 1580 - RNA, 19 nt, synthetic construct
  source 1..19: mol_type = other RNA
tctggtgaatccaagcata

SEQ ID NO: 1581 - RNA, 19 nt, synthetic construct
  source 1..19: mol_type = other RNA
ctctggtgaatccaagcat

SEQ ID NO: 1582 - RNA, 19 nt, synthetic construct
  source 1..19: mol_type = other RNA
actctggtgaatccaagca

SEQ ID NO: 1583 - RNA, 19 nt, synthetic construct
  source 1..19: mol_type = other RNA
cactctggtgaatccaagc

SEQ ID NO: 1584 - RNA, 19 nt, synthetic construct
  source 1..19: mol_type = other RNA
tcactctggtgaatccaag

SEQ ID NO: 1585 - RNA, 19 nt, synthetic construct
  source 1..19: mol_type = other RNA
gtcactctggtgaatccaa

SEQ ID NO: 1586 - RNA, 19 nt, synthetic construct
  source 1..19: mol_type = other RNA
agtcactctggtgaatcca

SEQ ID NO: 1587 - RNA, 19 nt, synthetic construct
  source 1..19: mol_type = other RNA
tagtcactctggtgaatcc

SEQ ID NO: 1588 - RNA, 19 nt, synthetic construct
  source 1..19: mol_type = other RNA
atagtcactctggtgaatc

SEQ ID NO: 1589 - RNA, 19 nt, synthetic construct
  source 1..19: mol_type = other RNA
catttcaagatacatgcgt

SEQ ID NO: 1590 - RNA, 19 nt, synthetic construct
  source 1..19: mol_type = other RNA
gcatttcaagatacatgcg

SEQ ID NO: 1591 - RNA, 19 nt, synthetic construct
  source 1..19: mol_type = other RNA
agcatttcaagatacatgc

SEQ ID NO: 1592 - RNA, 19 nt, synthetic construct
  source 1..19: mol_type = other RNA
aagcatttcaagatacatg

SEQ ID NO: 1593 - RNA, 19 nt, synthetic construct
  source 1..19: mol_type = other RNA
caagcatttcaagatacat

SEQ ID NO: 1594 - RNA, 19 nt, synthetic construct
  source 1..19: mol_type = other RNA
acaagcatttcaagataca

SEQ ID NO: 1595 - RNA, 19 nt, synthetic construct
  source 1..19: mol_type = other RNA
tacaagcatttcaagatac

SEQ ID NO: 1596 - RNA, 19 nt, synthetic construct
  source 1..19: mol_type = other RNA
ttacaagcatttcaagata

SEQ ID NO: 1597 - RNA, 19 nt, synthetic construct
  source 1..19: mol_type = other RNA
tttacaagcatttcaagat

SEQ ID NO: 1598 - RNA, 19 nt, synthetic construct
  source 1..19: mol_type = other RNA
tctttacaagcatttcaag

SEQ ID NO: 1599 - RNA, 19 nt, synthetic construct
  source 1..19: mol_type = other RNA
cctctttacaagcatttca

SEQ ID NO: 1600 - RNA, 19 nt, synthetic construct
  source 1..19: mol_type = other RNA
acctctttacaagcatttc

SEQ ID NO: 1601 - RNA, 19 nt, synthetic construct
  source 1..19: mol_type = other RNA
aacctctttacaagcattt

SEQ ID NO: 1602 - RNA, 19 nt, synthetic construct
  source 1..19: mol_type = other RNA
aaacctctttacaagcatt

SEQ ID NO: 1603 - RNA, 19 nt, synthetic construct
  source 1..19: mol_type = other RNA
agaaacctctttacaagca

SEQ ID NO: 1604 - RNA, 19 nt, synthetic construct
  source 1..19: mol_type = other RNA
tagaaacctctttacaagc

SEQ ID NO: 1605 - RNA, 19 nt, synthetic construct
  source 1..19: mol_type = other RNA
gcttcagtcctaatcctgt

SEQ ID NO: 1606 - RNA, 19 nt, synthetic construct
  source 1..19: mol_type = other RNA
atcgcttcagtcctaatcc

SEQ ID NO: 1607 - RNA, 19 nt, synthetic construct
  source 1..19: mol_type = other RNA
agcagggcacaagaacttc

SEQ ID NO: 1608 - RNA, 19 nt, synthetic construct
  source 1..19: mol_type = other RNA
taaagtgagtcagcagctt

SEQ ID NO: 1609 - RNA, 19 nt, synthetic construct
  source 1..19: mol_type = other RNA
ataaagtgagtcagcagct

SEQ ID NO: 1610 - RNA, 19 nt, synthetic construct
  source 1..19: mol_type = other RNA
tgataaagtgagtcagcag

SEQ ID NO: 1611 - RNA, 19 nt, synthetic construct
  source 1..19: mol_type = other RNA
attgataaagtgagtcagc

SEQ ID NO: 1612 - RNA, 19 nt, synthetic construct
  source 1..19: mol_type = other RNA
tattgataaagtgagtcag

SEQ ID NO: 1613 - RNA, 19 nt, synthetic construct
  source 1..19: mol_type = other RNA
ctattgataaagtgagtca

SEQ ID NO: 1614 - RNA, 19 nt, synthetic construct
  source 1..19: mol_type = other RNA
actattgataaagtgagtc

SEQ ID NO: 1615 - RNA, 19 nt, synthetic construct
  source 1..19: mol_type = other RNA
aactattgataaagtgagt

SEQ ID NO: 1616 - RNA, 19 nt, synthetic construct
  source 1..19: mol_type = other RNA
gaactattgataaagtgag

SEQ ID NO: 1617 - RNA, 19 nt, synthetic construct
  source 1..19: mol_type = other RNA
aacaggatacagtctcacc

SEQ ID NO: 1618 - RNA, 19 nt, synthetic construct
  source 1..19: mol_type = other RNA
aaacaggatacagtctcac

SEQ ID NO: 1619 - RNA, 19 nt, synthetic construct
  source 1..19: mol_type = other RNA
caaacaggatacagtctca

SEQ ID NO: 1620 - RNA, 19 nt, synthetic construct
  source 1..19: mol_type = other RNA
gcaaacaggatacagtctc

SEQ ID NO: 1621 - RNA, 19 nt, synthetic construct
  source 1..19: mol_type = other RNA
agcaaacaggatacagtct

SEQ ID NO: 1622 - RNA, 19 nt, synthetic construct
  source 1..19: mol_type = other RNA
tagcaaacaggatacagtc

SEQ ID NO: 1623 - RNA, 19 nt, synthetic construct
  source 1..19: mol_type = other RNA
atagcaaacaggatacagt

SEQ ID NO: 1624 - RNA, 19 nt, synthetic construct
  source 1..19: mol_type = other RNA
aatagcaaacaggatacag

SEQ ID NO: 1625 - RNA, 19 nt, synthetic construct
  source 1..19: mol_type = other RNA
caatagcaaacaggataca

SEQ ID NO: 1626 - RNA, 19 nt, synthetic construct
  source 1..19: mol_type = other RNA
gcaatagcaaacaggatac

SEQ ID NO: 1627 - RNA, 19 nt, synthetic construct
  source 1..19: mol_type = other RNA
aagcaatagcaaacaggat

SEQ ID NO: 1628 - RNA, 19 nt, synthetic construct
  source 1..19: mol_type = other RNA
atgaaaagggttacgaggc

SEQ ID NO: 1629 - RNA, 19 nt, synthetic construct
  source 1..19: mol_type = other RNA
tgctcaacatggcaaactc

SEQ ID NO: 1630 - RNA, 19 nt, synthetic construct
  source 1..19: mol_type = other RNA
ctgctcaacatggcaaact

SEQ ID NO: 1631 - RNA, 19 nt, synthetic construct
  source 1..19: mol_type = other RNA
tcctgctcaacatggcaaa

SEQ ID NO: 1632 - RNA, 19 nt, synthetic construct
  source 1..19: mol_type = other RNA
attaccgaagaaatcatgg

SEQ ID NO: 1633 - RNA, 19 nt, synthetic construct
  source 1..19: mol_type = other RNA
acattcacagacagaaagc

SEQ ID NO: 1634 - RNA, 19 nt, synthetic construct
  source 1..19: mol_type = other RNA
gacattcacagacagaaag

SEQ ID NO: 1635 - RNA, 19 nt, synthetic construct
  source 1..19: mol_type = other RNA
tatatagacattcacagac

SEQ ID NO: 1636 - RNA, 19 nt, synthetic construct
  source 1..19: mol_type = other RNA
ctatatagacattcacaga

SEQ ID NO: 1637 - RNA, 19 nt, synthetic construct
  source 1..19: mol_type = other RNA
actatatagacattcacag

SEQ ID NO: 1638 - RNA, 19 nt, synthetic construct
  source 1..19: mol_type = other RNA
cactatatagacattcaca

SEQ ID NO: 1639 - RNA, 19 nt, synthetic construct
  source 1..19: mol_type = other RNA
acactatatagacattcac

SEQ ID NO: 1640 - RNA, 19 nt, synthetic construct
  source 1..19: mol_type = other RNA
tacactatatagacattca

SEQ ID NO: 1641 - RNA, 19 nt, synthetic construct
  source 1..19: mol_type = other RNA
aatacactatatagacatt

SEQ ID NO: 1642 - RNA, 19 nt, synthetic construct
  source 1..19: mol_type = other RNA
cacaatacactatatagac

SEQ ID NO: 1643 - RNA, 19 nt, synthetic construct
  source 1..19: mol_type = other RNA
acacaatacactatataga

SEQ ID NO: 1644 - RNA, 19 nt, synthetic construct
  source 1..19: mol_type = other RNA
cacacaatacactatatag

SEQ ID NO: 1645 - RNA, 19 nt, synthetic construct
  source 1..19: mol_type = other RNA
acacacaatacactatata

SEQ ID NO: 1646 - RNA, 19 nt, synthetic construct
  source 1..19: mol_type = other RNA
aacacacaatacactatat

SEQ ID NO: 1647 - RNA, 19 nt, synthetic construct
  source 1..19: mol_type = other RNA
aaacacacaatacactata

SEQ ID NO: 1648 - RNA, 19 nt, synthetic construct
  source 1..19: mol_type = other RNA
aaaacacacaatacactat

SEQ ID NO: 1649 - RNA, 19 nt, synthetic construct
  source 1..19: mol_type = other RNA
taaaacacacaatacacta

SEQ ID NO: 1650 - RNA, 19 nt, synthetic construct
  source 1..19: mol_type = other RNA
ttaaaacacacaatacact

SEQ ID NO: 1651 - RNA, 19 nt, synthetic construct
  source 1..19: mol_type = other RNA
gttaaaacacacaatacac

SEQ ID NO: 1652 - RNA, 19 nt, synthetic construct
  source 1..19: mol_type = other RNA
tgttaaaacacacaataca

SEQ ID NO: 1653 - RNA, 19 nt, synthetic construct
  source 1..19: mol_type = other RNA
ttgttaaaacacacaatac

SEQ ID NO: 1654 - RNA, 19 nt, synthetic construct
  source 1..19: mol_type = other RNA
tttgttaaaacacacaata

SEQ ID NO: 1655 - RNA, 19 nt, synthetic construct
  source 1..19: mol_type = other RNA
atttgttaaaacacacaat

SEQ ID NO: 1656 - RNA, 19 nt, synthetic construct
  source 1..19: mol_type = other RNA
catttgttaaaacacacaa

SEQ ID NO: 1657 - RNA, 19 nt, synthetic construct
  source 1..19: mol_type = other RNA
tcatttgttaaaacacaca

SEQ ID NO: 1658 - RNA, 19 nt, synthetic construct
  source 1..19: mol_type = other RNA
atcatttgttaaaacacac

SEQ ID NO: 1659 - RNA, 19 nt, synthetic construct
  source 1..19: mol_type = other RNA
aatcatttgttaaaacaca

SEQ ID NO: 1660 - RNA, 19 nt, synthetic construct
  source 1..19: mol_type = other RNA
aaatcatttgttaaaacac

SEQ ID NO: 1661 - RNA, 19 nt, synthetic construct
  source 1..19: mol_type = other RNA
taaatcatttgttaaaaca

SEQ ID NO: 1662 - RNA, 19 nt, synthetic construct
  source 1..19: mol_type = other RNA
gtaaatcatttgttaaaac

SEQ ID NO: 1663 - RNA, 19 nt, synthetic construct
  source 1..19: mol_type = other RNA
tgtaaatcatttgttaaaa

SEQ ID NO: 1664 - RNA, 19 nt, synthetic construct
  source 1..19: mol_type = other RNA
cagtgtaaatcatttgtta

SEQ ID NO: 1665 - RNA, 19 nt, synthetic construct
  source 1..19: mol_type = other RNA
tcagtgtaaatcatttgtt

SEQ ID NO: 1666 - RNA, 19 nt, synthetic construct
  source 1..19: mol_type = other RNA
gtcagtgtaaatcatttgt

SEQ ID NO: 1667 - RNA, 19 nt, synthetic construct
  source 1..19: mol_type = other RNA
agtcagtgtaaatcatttg

SEQ ID NO: 1668 - RNA, 19 nt, synthetic construct
  source 1..19: mol_type = other RNA
acagtcagtgtaaatcatt

SEQ ID NO: 1669 - RNA, 19 nt, synthetic construct
  source 1..19: mol_type = other RNA
aacagtcagtgtaaatcat

SEQ ID NO: 1670 - RNA, 19 nt, synthetic construct
  source 1..19: mol_type = other RNA
caacagtcagtgtaaatca

SEQ ID NO: 1671 - RNA, 19 nt, synthetic construct
  source 1..19: mol_type = other RNA
gcaacagtcagtgtaaatc

SEQ ID NO: 1672 - RNA, 19 nt, synthetic construct
  source 1..19: mol_type = other RNA
agcaacagtcagtgtaaat

SEQ ID NO: 1673 - RNA, 19 nt, synthetic construct
  source 1..19: mol_type = other RNA
acttttacagcaacagtca

SEQ ID NO: 1674 - RNA, 19 nt, synthetic construct
  source 1..19: mol_type = other RNA
ttcacttttacagcaacag

SEQ ID NO: 1675 - RNA, 19 nt, synthetic construct
  source 1..19: mol_type = other RNA
attcacttttacagcaaca

SEQ ID NO: 1676 - RNA, 19 nt, synthetic construct
  source 1..19: mol_type = other RNA
aaattcacttttacagcaa

SEQ ID NO: 1677 - RNA, 19 nt, synthetic construct
  source 1..19: mol_type = other RNA
caaattcacttttacagca

SEQ ID NO: 1678 - RNA, 19 nt, synthetic construct
  source 1..19: mol_type = other RNA
ccaaattcacttttacagc

SEQ ID NO: 1679 - RNA, 19 nt, synthetic construct
  source 1..19: mol_type = other RNA
tccaaattcacttttacag

SEQ ID NO: 1680 - RNA, 16 nt, synthetic construct
  source 1..16: mol_type = other RNA
gcagccgaaaggctgc

SEQ ID NO: 1681 - RNA, 20 nt, synthetic construct
  source 1..20: mol_type = other RNA
caggtggaagtaaaatctga

SEQ ID NO: 1682 - RNA, 20 nt, synthetic construct
  source 1..20: mol_type = other RNA
  modified_base 1: mod_base = OTHER; note O-((2R,3R,4R,5S)-5(4-amino-2-oxopyrimidin-1(2H)-yl)-2-(hydr oxymethyl)-4-((2-(2-palmitamidoethoxy)ethoxy)methyoxy)tetra hydrofuran-3-yl) O,O-dihydrogen phosphorothioate
  modified_base 2: mod_base = OTHER; note = 2'-O-methyl modified nucleotide
  modified_base 3: mod_base = OTHER; note = 2'-fluoro modified nucleotide
  modified_base 4: mod_base = OTHER; note = 2'-O-methyl modified nucleotide
  modified_base 5: mod_base = OTHER; note = 2'-fluoro modified nucleotide
  modified_base 6: mod_base = OTHER; note = 2'-O-methyl modified nucleotide
  modified_base 7: mod_base = OTHER; note = 2'-O-methyl modified nucleotide
  modified_base 8: mod_base = OTHER; note = 2'-fluoro modified nucleotide
  modified_base 9: mod_base = OTHER; note = 2'-O-methyl modified nucleotide
  modified_base 10: mod_base = OTHER; note = 2'-fluoro modified nucleotide
  modified_base 11: mod_base = OTHER; note = 2'-O-methyl modified nucleotide
  modified_base 12: mod_base = OTHER; note = 2'-fluoro modified nucleotide
  modified_base 13: mod_base = OTHER; note = 2'-fluoro modified nucleotide
  modified_base 14: mod_base = OTHER; note = 2'-O-methyl modified nucleotide
  modified_base 15: mod_base = OTHER; note = 2'-fluoro modified nucleotide
  modified_base 16: mod_base = OTHER; note = 2'-O-methyl modified nucleotide
  modified_base 17: mod_base = OTHER; note = 2'-fluoro modified nucleotide
  modified_base 18: mod_base = OTHER; note = 2'-O-methyl modified nucleotide with phosphorothioate linkage
  modified_base 19: mod_base = OTHER; note = 2'-O-methyl modified nucleotide with phosphorothioate linkage
  modified_base 20: mod_base = OTHER; note = 2'-O-methyl modified nucleotide
caggtggaagtaaaatctga

SEQ ID NO: 1683 - DNA, 18 bp, synthetic construct
  source 1..18: mol_type = other DNA
gaagattgggtccctgga

SEQ ID NO: 1684 - DNA, 18 bp, synthetic construct
  source 1..18: mol_type = other DNA
tgtcttggctttggcgtt

SEQ ID NO: 1685 - DNA, 15 bp, synthetic construct
  source 1..15: mol_type = other DNA
  modified_base 1: mod_base = OTHER; note = 6-Carboxyfluorescein-CGGAAGGTC-ZEN quencher modified nucleotide
agcttgtgggtttca

SEQ ID NO: 1686 - DNA, 18 bp, synthetic construct
  source 1..18: mol_type = other DNA
caccacagccaccttctc

SEQ ID NO: 1687 - DNA, 21 bp, synthetic construct
  source 1..21: mol_type = other DNA
cttccatcacttcgaactcct

SEQ ID NO: 1688 - DNA, 12 bp, synthetic construct
  source 1..12: mol_type = other DNA
  modified_base 1: mod_base = OTHER; note = 6-Carboxyfluorescein-CGTCCTCGC-ZEN quencher modified nucleotide
ctctgtcgacta

SEQ ID NO: 1689 - protein, 5 aa, unidentified
CREKA

SEQ ID NO: 1690 - DNA, 23 bp, synthetic construct
  source 1..23: mol_type = other DNA
aggacagagtgcagtcgaagatc

SEQ ID NO: 1691 - DNA, 21 bp, synthetic construct
  source 1..21: mol_type = other DNA
aggtcagcttgtgggtttcaa

SEQ ID NO: 1692 - DNA, 21 bp, synthetic construct
  source 1..21: mol_type = other DNA
cacccatgtccctggcggagg

SEQ ID NO: 1693 - RNA, 42 nt, synthetic construct
  source 1..42: mol_type = other RNA
  modified_base 1: mod_base = OTHER; note O-((2R,3R,4R,5S)-5(4-amino-2-oxopyrimidin-1(2H)-yl)-2-(hydr oxymethyl)-4-((2-(2-palmitamidoethoxy)ethoxy)methyoxy)tetra hydrofuran-3-yl) O,O-dihydrogen phosphorothioate
  modified_base 2: mod_base = OTHER; note = 2'-O-methyl modified nucleotide
  modified_base 3: mod_base = OTHER; note = 2'-fluoro modified nucleotide
  modified_base 4: mod_base = OTHER; note = 2'-O-methyl modified nucleotide
  modified_base 5: mod_base = OTHER; note = 2'-fluoro modified nucleotide
  modified_base 6: mod_base = OTHER; note = 2'-O-methyl modified nucleotide
  modified_base 7: mod_base = OTHER; note = 2'-O-methyl modified nucleotide
  modified_base 8: mod_base = OTHER; note = 2'-fluoro modified nucleotide
  modified_base 9: mod_base = OTHER; note = 2'-O-methyl modified nucleotide
  modified_base 10: mod_base = OTHER; note = 2'-fluoro modified nucleotide
  modified_base 11: mod_base = OTHER; note = 2'-O-methyl modified nucleotide
  modified_base 12: mod_base = OTHER; note = 2'-fluoro modified nucleotide
  modified_base 13: mod_base = OTHER; note = 2'-fluoro modified nucleotide
  modified_base 14: mod_base = OTHER; note = 2'-O-methyl modified nucleotide
  modified_base 15: mod_base = OTHER; note = 2'-fluoro modified nucleotide
  modified_base 16: mod_base = OTHER; note = 2'-O-methyl modified nucleotide
  modified_base 17: mod_base = OTHER; note = 2'-fluoro modified nucleotide
  modified_base 18: mod_base = OTHER; note = 2'-O-methyl modified nucleotide with phosphorothioate linkage
  modified_base 19: mod_base = OTHER; note = 2'-O-methyl modified nucleotide with phosphorothioate linkage
  modified_base 20: mod_base = OTHER; note = 2'-O-methyl modified nucleotide
  modified_base 21: mod_base = OTHER; note = 4'-O-monomethylphosphonate-2'-O-methyl modified nucleotide
  modified_base 22: mod_base = OTHER; note = 2'-fluoro modified nucleotide with phosphorothioate linkage
  modified_base 23: mod_base = OTHER; note = 2'-fluoro modified nucleotide
  modified_base 24: mod_base = OTHER; note = 2'-fluoro modified nucleotide
  modified_base 25: mod_base = OTHER; note = 2'-fluoro modified nucleotide
  modified_base 26: mod_base = OTHER; note = 2'-O-methyl modified nucleotide
  modified_base 27: mod_base = OTHER; note = 2'-fluoro modified nucleotide
  modified_base 28: mod_base = OTHER; note = 2'-O-methyl modified nucleotide
  modified_base 29: mod_base = OTHER; note = 2'-O-methyl modified nucleotide
  modified_base 30: mod_base = OTHER; note = 2'-fluoro modified nucleotide
  modified_base 31: mod_base = OTHER; note = 2'-O-methyl modified nucleotide
  modified_base 32: mod_base = OTHER; note = 2'-O-methyl modified nucleotide
  modified_base 33: mod_base = OTHER; note = 2'-O-methyl modified nucleotide
  modified_base 34: mod_base = OTHER; note = 2'-fluoro modified nucleotide
  modified_base 35: mod_base = OTHER; note = 2'-O-methyl modified nucleotide
  modified_base 36: mod_base = OTHER; note = 2'-fluoro modified nucleotide
  modified_base 37: mod_base = OTHER; note = 2'-O-methyl modified nucleotide
  modified_base 38: mod_base = OTHER; note = 2'-O-methyl modified nucleotide
  modified_base 39: mod_base = OTHER; note = 2'-fluoro modified nucleotide
  modified_base 40: mod_base = OTHER; note = 2'-O-methyl modified nucleotide with phosphorothioate linkage
  modified_base 41: mod_base = OTHER; note = 2'-O-methyl modified nucleotide with phosphorothioate linkage
  modified_base 42: mod_base = OTHER; note = 2'-O-methyl modified nucleotide
caggtggaagtaaaatctgatcagattttacttccacctggg

SEQ ID NO: 1694 - RNA, 58 nt, synthetic construct
  source 1..58: mol_type = other RNA
  modified_base 1: mod_base = OTHER; note = 2'-O-methyl modified nucleotide with phosphorothioate linkage
  modified_base 2: mod_base = OTHER; note = 2'-O-methyl modified nucleotide
  modified_base 3: mod_base = OTHER; note = 2'-fluoro modified nucleotide
  modified_base 4: mod_base = OTHER; note = 2'-O-methyl modified nucleotide
  modified_base 5: mod_base = OTHER; note = 2'-fluoro modified nucleotide
  modified_base 6: mod_base = OTHER; note = 2'-O-methyl modified nucleotide
  modified_base 7: mod_base = OTHER; note = 2'-O-methyl modified nucleotide
  modified_base 8: mod_base = OTHER; note = 2'-fluoro modified nucleotide
  modified_base 9: mod_base = OTHER; note = 2'-O-methyl modified nucleotide
  modified_base 10: mod_base = OTHER; note = 2'-fluoro modified nucleotide
  modified_base 11: mod_base = OTHER; note = 2'-O-methyl modified nucleotide
  modified_base 12: mod_base = OTHER; note = 2'-fluoro modified nucleotide
  modified_base 13: mod_base = OTHER; note = 2'-fluoro modified nucleotide
  modified_base 14: mod_base = OTHER; note = 2'-O-methyl modified nucleotide
  modified_base 15: mod_base = OTHER; note = 2'-fluoro modified nucleotide
  modified_base 16: mod_base = OTHER; note = 2'-O-methyl modified nucleotide
  modified_base 17: mod_base = OTHER; note = 2'-fluoro modified nucleotide
  modified_base 18: mod_base = OTHER; note = 2'-O-methyl modified nucleotide
  modified_base 19: mod_base = OTHER; note = 2'-O-methyl modified nucleotide
  modified_base 20: mod_base = OTHER; note = 2'-O-methyl modified nucleotide
  modified_base 21: mod_base = OTHER; note = 2'-O-methyl modified nucleotide
  modified_base 22: mod_base = OTHER; note = 2'-O-methyl modified nucleotide
  modified_base 23: mod_base = OTHER; note = 2'-O-methyl modified nucleotide
  modified_base 24: mod_base = OTHER; note = 2'-O-methyl modified nucleotide
  modified_base 25: mod_base = OTHER; note = 2'-O-methyl modified nucleotide
  modified_base 26: mod_base = OTHER; note = 2'-O-methyl modified nucleotide
  modified_base 27: mod_base = OTHER; note = 2'-O-methyl modified nucleotide
  modified_base 28: mod_base = OTHER; note = N-Acetylgalactosamine modified nucloeotide
  modified_base 29: mod_base = OTHER; note = N-Acetylgalactosamine modified nucloeotide
  modified_base 30: mod_base = OTHER; note = N-Acetylgalactosamine modified nucloeotide
  modified_base 31: mod_base = OTHER; note = 2'-O-methyl modified nucleotide
  modified_base 32: mod_base = OTHER; note = 2'-O-methyl modified nucleotide
  modified_base 33: mod_base = OTHER; note = 2'-O-methyl modified nucleotide
  modified_base 34: mod_base = OTHER; note = 2'-O-methyl modified nucleotide
  modified_base 35: mod_base = OTHER; note = 2'-O-methyl modified nucleotide
  modified_base 36: mod_base = OTHER; note = 2'-O-methyl modified nucleotide
  modified_base 37: mod_base = OTHER; note = 4'-O-monomethylphosphonate-2'-O-methyl modified nucleotide
  modified_base 38: mod_base = OTHER; note = 2'-fluoro modified nucleotide with phosphorothioate linkage
  modified_base 39: mod_base = OTHER; note = 2'-fluoro modified nucleotide
  modified_base 40: mod_base = OTHER; note = 2'-fluoro modified nucleotide
  modified_base 41: mod_base = OTHER; note = 2'-fluoro modified nucleotide
  modified_base 42: mod_base = OTHER; note = 2'-O-methyl modified nucleotide
  modified_base 43: mod_base = OTHER; note = 2'-fluoro modified nucleotide
  modified_base 44: mod_base = OTHER; note = 2'-O-methyl modified nucleotide
  modified_base 45: mod_base = OTHER; note = 2'-O-methyl modified nucleotide
  modified_base 46: mod_base = OTHER; note = 2'-fluoro modified nucleotide
  modified_base 47: mod_base = OTHER; note = 2'-O-methyl modified nucleotide
  modified_base 48: mod_base = OTHER; note = 2'-O-methyl modified nucleotide
  modified_base 49: mod_base = OTHER; note = 2'-O-methyl modified nucleotide
  modified_base 50: mod_base = OTHER; note = 2'-fluoro modified nucleotide
  modified_base 51: mod_base = OTHER; note = 2'-O-methyl modified nucleotide
  modified_base 52: mod_base = OTHER; note = 2'-fluoro modified nucleotide
  modified_base 53: mod_base = OTHER; note = 2'-O-methyl modified nucleotide
  modified_base 54: mod_base = OTHER; note = 2'-O-methyl modified nucleotide
  modified_base 55: mod_base = OTHER; note = 2'-fluoro modified nucleotide
  modified_base 56: mod_base = OTHER; note = 2'-O-methyl modified nucleotide with phosphorothioate linkage
  modified_base 57: mod_base = OTHER; note = 2'-O-methyl modified nucleotide with phosphorothioate linkage
  modified_base 58: mod_base = OTHER; note = 2'-O-methyl modified nucleotide
caggtggaagtaaaatctgagcagccgaaaggctgctcagattttacttccacctggg
